(19) United States
(12) Patent Application Publication
(10) Pub. No.: US 2008/0003673 A1
(43) Pub. Date: Jan. 3, 2008

(54) Novel human proteases and polynucleotides encoding the same

(76) Inventors: Alejandro Abuin, The Woodlands, TX (US); Gregory Donoho, Indianapolis, IN (US); Carl Johan Friddle, The Woodlands, TX (US); Glenn Friedrich, Houston, TX (US); Brenda Gerhardt, Spring, TX (US); Erin Hilbun, Denton, TX (US); Yi Hu, Spring, TX (US); James Alvin Kieke, Houston, TX (US); Maricar Miranda, The Woodlands, TX (US); Michael C. Nehls, Stockdorf (DE); Boris Nepomnichy, Dickinson, TX (US); Andrew Olson, San Diego, CA (US); Arthur T. Sands, The Woodlands, TX (US); John Scoville, Pearland, TX (US); C. Alexander Turner JR., The Woodlands, TX (US); D. Wade Walke, Spring, TX (US); Nathaniel L. Wilganowski, Houston, TX (US); Xuanchuan Yu, Conroe, TX (US); Brian Zambrowicz, The Woodlands, TX (US)

Correspondence Address: LEXICON PHARMACEUTICALS, INC., 8800 TECHNOLOGY FOREST PLACE, THE WOODLANDS, TX, 77381-1160, US

(21) Appl. No.: 11/220,398

(22) Filed: Sep. 6, 2005

Related U.S. Application Data
(63) Continuation-in-part of application No. 10/760,709, filed on Jan. 20, 2004, now abandoned.
Application No. 10/760,709 is a division of application No. 10/202,619, filed on Jul. 23, 2002, now Pat. No. 6,716,614.
Application No. 10/202,619 is a continuation-in-part of application No. 09/653,839, filed on Sep. 1, 2000, now Pat. No. 6,433,153.
(63) Continuation-in-part of application No. 10/872,968, filed on Jun. 21, 2004, now abandoned.
Application No. 10/872,968 is a continuation of application No. 10/200,344, filed on Jul. 19, 2002, now Pat. No. 6,780,640.
Application No. 10/200,344 is a continuation of application No. 09/675,305, filed on Sep. 29, 2000, now Pat. No. 6,441,153.
(63) Continuation-in-part of application No. 10/843,130, filed on May 11, 2004, now abandoned.
Application No. 10/843,130 is a division of application No. 10/200,910, filed on Jul. 22, 2002, now Pat. No. 6,777,221.
Application No. 10/200,910 is a continuation of application No. 09/710,099, filed on Nov. 10, 2000, now Pat. No. 6,441,154.
(63) Continuation-in-part of application No. 11/027,743, filed on Dec. 30, 2004, now abandoned.
Application No. 11/027,743 is a continuation of application No. 10/419,276, filed on Apr. 17, 2003, now Pat. No. 6,852,521.
Application No. 10/419,276 is a continuation of application No. 09/963,791, filed on Dec. 8, 2000, now Pat. No. 6,649,399.
(63) Continuation-in-part of application No. 10/889,890, filed on Jul. 12, 2004, now abandoned.
Application No. 10/889,890 is a continuation of application No. 09/735,713, filed on Dec. 12, 2000, now abandoned.
(63) Continuation-in-part of application No. 11/049,613, filed on Feb. 2, 2005, now abandoned.
Application No. 11/049,613 is a continuation of application No. 09/755,016, filed on Jan. 5, 2001, now abandoned.
(63) Continuation-in-part of application No. 11/036,185, filed on Jan. 10, 2005, now abandoned.
Application No. 11/036,185 is a division of application No. 10/766,074, filed on Jan. 28, 2004, now Pat. No. 6,881,563.
Application No. 10/766,074 is a division of application No. 10/214,811, filed on Aug. 7, 2002, now Pat. No. 6,743,621.
Application No. 10/214,811 is a continuation of application No. 09/780,016, filed on Feb. 9, 2001, now Pat. No. 6,509,456.
(63) Continuation-in-part of application No. 10/760,783, filed on Jan. 20, 2004, now abandoned.
Application No. 10/760,783 is a division of application No. 09/784,358, filed on Feb. 15, 2001, now Pat. No. 6,720,412.
(63) Continuation-in-part of application No. 10/984,359, filed on Nov. 8, 2004, now abandoned.
Application No. 10/984,359 is a continuation of application No. 09/833,782, filed on Apr. 12, 2001.
(63) Continuation-in-part of application No. 11/120,146, filed on May 2, 2005, now abandoned.
Application No. 11/120,146 is a continuation of application No. 09/854,844, filed on May 14, 2001, now abandoned.
(63) Continuation-in-part of application No. 10/950,177, filed on Sep. 24, 2004, now abandoned.
Application No. 10/950,177 is a continuation of application No. 09/863,824, filed on May 23, 2001, now abandoned.
(63) Continuation-in-part of application No. 10/804,457, filed on Mar. 19, 2004, now abandoned.
Application No. 10/804,457 is a division of application No. 10/217,774, filed on Aug. 12, 2002, now Pat. No. 6,734,007.
Application No. 10/217,774 is a continuation of application No. 09/930,872, filed on Aug. 15, 2001, now Pat. No. 6,448,388.
(63) Continuation-in-part of application No. 11/039,398, filed on Jan. 20, 2005, now abandoned.
Application No. 11/039,398 is a continuation of application No. 09/938,330, filed on Aug. 22, 2001, now abandoned.
(63) Continuation-in-part of application No. 10/961,020, filed on Oct. 8, 2004, now abandoned.
Application No. 10/961,020 is a continuation of application No. 09/965,631, filed on Sep. 27, 2001, now abandoned.
(63) Continuation-in-part of application No. 09/962,739, filed on Sep. 25, 2001, now abandoned.
(63) Continuation-in-part of application No. 09/969,515, filed on Oct. 2, 2001, now abandoned.
(63) Continuation-in-part of application No. 10/964,106, filed on Oct. 13, 2004, now abandoned.
Application No. 10/964,106 is a continuation of application No. 10/020,733, filed on Oct. 30, 2001, now abandoned.
(63) Continuation-in-part of application No. 10/919,124, filed on Aug. 16, 2004, now abandoned.
Application No. 10/919,124 is a continuation of application No. 10/014,896, filed on Dec. 11, 2001, now abandoned.
(63) Continuation-in-part of application No. 11/049,616, filed on Feb. 2, 2005, now abandoned.
Application No. 11/049,616 is a continuation of application No. 10/022,710, filed on Dec. 13, 2001, now abandoned.
(63) Continuation-in-part of application No. 11/025,651, filed on Dec. 29, 2004, now abandoned.
Application No. 11/025,651 is a continuation of application No. 10/041,770, filed on Jan. 8, 2002, now abandoned.
(63) Continuation-in-part of application No. 10/999,109, filed on Nov. 29, 2004, now abandoned.
Application No. 10/999,109 is a continuation of application No. 10/044,807, filed on Jan. 11, 2002, now abandoned.
(63) Continuation-in-part of application No. 10/078,592, filed on Feb. 19, 2002, now abandoned.
(63) Continuation-in-part of application No. 10/990,935, filed on Nov. 17, 2004, now abandoned.
Application No. 10/990,935 is a continuation of application No. 10/226,560, filed on Aug. 22, 2002, now abandoned.
Application No. 10/226,560 is a continuation-in-part of application No. 09/917,614, filed on Jul. 27, 2001, now abandoned.
(60) Provisional application No. 60/152,057, filed on Sep. 2, 1999.
(60) Provisional application No. 60/156,685, filed on Sep. 29, 1999.
(60) Provisional application No. 60/165,260, filed on Nov. 12, 1999.
(60) Provisional application No. 60/169,769, filed on Dec. 9, 1999.
(60) Provisional application No. 60/171,566, filed on Dec. 22, 1999.
(60) Provisional application No. 60/174,686, filed on Jan. 6, 2000.
(60) Provisional application No. 60/181,924, filed on Feb. 11, 2000.
(60) Provisional application No. 60/183,282, filed on Feb. 17, 2000.
(60) Provisional application No. 60/196,319, filed on Apr. 12, 2000.
(60) Provisional application No. 60/205,275, filed on May 18, 2000.
(60) Provisional application No. 60/206,415, filed on May 23, 2000.
(60) Provisional application No. 60/225,852, filed on Aug. 16, 2000.
(60) Provisional application No. 60/227,104, filed on Aug. 22, 2000.
(60) Provisional application No. 60/233,796, filed on Sep. 19, 2000.
(60) Provisional application No. 60/236,689, filed on Sep. 29, 2000.
(60) Provisional application No. 60/236,690, filed on Sep. 29, 2000.
(60) Provisional application No. 60/237,540, filed on Oct. 4, 2000.
(60) Provisional application No. 60/244,939, filed on Nov. 1, 2000.
(60) Provisional application No. 60/255,567, filed on Dec. 14, 2000.
(60) Provisional application No. 60/259,033, filed on Dec. 28, 2000.
(60) Provisional application No. 60/260,276, filed on Jan. 8, 2001.
(60) Provisional application No. 60/261,684, filed on Jan. 12, 2001.
(60) Provisional application No. 60/270,320, filed on Feb. 20, 2001.
(60) Provisional application No. 60/221,644, filed on Jul. 28, 2000.

(51) Int. Cl. C12N 15/00; C07H 21/04; C07K 1/00

(52) U.S. Cl. 435/320.1; 530/350; 536/23.2

(57) ABSTRACT

Novel human polynucleotide and polypeptide sequences are disclosed that can be used in therapeutic, diagnostic, and pharmacogenomic applications.

### 1.0 CROSS-REFERENCE TO RELATED APPLICATIONS

[0001] The present application is a continuation-in-part of: co-pending U.S. application Ser. No. 10/760,709, filed on Jan. 20, 2004, which is a divisional of U.S. application Ser. No. 10/202,619, filed on Jul. 23, 2002, which issued as U.S. Pat. No. 6,716,614 B1 on Apr. 6, 2004, which is a continuation-in-part of U.S. application Ser. No. 09/653,839, filed on Sep. 1, 2000, which issued as U.S. Pat. No. 6,433,153 B1 on Aug. 13, 2002, which claims the benefit of U.S. Provisional Application No. 60/152,057, filed on Sep. 2, 1999; co-pending U.S. application Ser. No. 10/872,968, filed on Jun. 21, 2004, which is a continuation of U.S. application Ser. No. 10/200,344, filed on Jul. 19, 2002, which issued as U.S. Pat. No. 6,780,640 B2 on Aug. 24, 2004, which is a continuation of U.S. application Ser. No. 09/675,305, filed on Sep. 29, 2000, which issued as U.S. Pat. No. 6,441,153 B1 on Aug. 27, 2002, which claims the benefit of U.S. Provisional Application No. 60/156,685, filed on Aug. 29, 1999; co-pending U.S. application Ser. No. 10/843,130, filed on May 11, 2004, which is a divisional of U.S. application Ser. No. 10/200,910, filed on Jul. 22, 2002, which issued as U.S. Pat. No. 6,777,221 B2 on Aug. 17, 2004, which is a continuation of U.S. application Ser. No. 09/710,099, filed on Nov. 10, 2000, which issued as U.S. Pat. No. 6,441,154 B1 on Aug. 27, 2002, which claims the benefit of U.S. Provisional Application No. 60/165,260, filed on Nov. 12, 1999; co-pending U.S. application Ser. No. 11/027,743, filed on Dec. 30, 2004, which is a continuation of U.S. application Ser. No. 10/419,276, filed on Apr. 17, 2003, which issued as U.S. Pat. No. 6,852,521 B2 on Feb. 8, 2005, which is a continuation of U.S. application Ser. No. 09/963,791, filed on Dec. 8, 2000, which issued as U.S. Pat. No. 6,649,399 B2 on Nov. 18, 2003, which claims the benefit of U.S. Provisional Application No. 60/169,769, filed on Dec. 9, 1999; co-pending U.S. application Ser. No. 10/889,890, filed on Jul. 12, 2004, which is a continuation of U.S. application Ser. No. 09/735,713, filed on Dec. 12, 2000, abandoned, which claims the benefit of U.S. Provisional Application No. 60/171,566, filed on Dec. 22, 1999; co-pending U.S. application Ser. No. 11/049,613, filed on Feb. 2, 2005, which is a continuation of U.S. application Ser. No. 09/755,016, filed on Jan. 5, 2001, abandoned, which claims the benefit of U.S. Provisional Application No. 60/174,686, filed on Jan. 6, 2000; co-pending U.S. application Ser. No. 11/036,185, filed on Jan. 10, 2005, which is a divisional of co-pending U.S. application Ser. No. 10/766,074, filed on Jan. 28, 2004, which issued as U.S. Pat. No. 6,881,563 B2 on Apr. 19, 2005, which is a divisional of co-pending U.S. application Ser. No. 10/214,811, filed on Aug. 7, 2002, which issued as U.S. Pat. No. 6,743,621 B2 on Jun. 1, 2004, which is a continuation of U.S. application Ser. No. 09/780,016, filed on Feb. 9, 2001, which issued as U.S. Pat. No. 6,509,456 B2 on Jan. 21, 2003, which claims the benefit of U.S. Provisional Application No. 60/181,924, filed on Feb. 11, 2000; co-pending U.S. application Ser. No. 10/760,783, filed on Jan. 20, 2004, which is a divisional of U.S. application Ser. No. 09/784,358, filed on Feb. 15, 2001, which issued as U.S. Pat. No. 6,720,412 B2 on Apr. 13, 2004, which claims the benefit of U.S. Provisional Application No. 60/183,282, filed on Feb. 17, 2000; co-pending U.S. application Ser. No. 10/984,359, filed on Nov. 8, 2004, which is a continuation of U.S. application Ser. No. 09/833,782, filed on Apr. 12, 2001, which claims the benefit of U.S. Provisional Application No. 60/196,319, filed on Apr. 12, 2000; co-pending U.S. application Ser. No. 11/120,146, filed on May 2, 2005, which is a continuation of U.S. application Ser. No. 09/854,844, filed on May 14, 2001, abandoned, which claims the benefit of U.S. Provisional Application No. 60/205,275, filed on May 18, 2000; co-pending U.S. application Ser. No. 10/950,177, filed on Sep. 24, 2004, which is a continuation of U.S. application Ser. No. 09/863,824, filed on May 23, 2001, abandoned, which claims the benefit of U.S. Provisional Application No. 60/206,415, filed on May 23, 2000; co-pending U.S. application Ser. No. 10/804,457, filed on Mar. 19, 2004, which is a divisional of U.S. application Ser. No. 10/217,774, filed on Aug. 12, 2002, which issued as U.S. Pat. No. 6,734,007 B2 on May 11, 2004, which is a continuation of U.S. application Ser. No. 09/930,872, filed on Aug. 15, 2001, which issued as U.S. Pat. No. 6,448,388 B1 on Sep. 10, 2002, which claims the benefit of U.S. Provisional Application No. 60/225,852, filed on Aug. 16, 2000; co-pending U.S. application Ser. No. 11/039,398, filed on Jan. 20, 2005, which is a continuation of U.S. application Ser. No. 09/938,330, filed on Aug. 22, 2001, abandoned, which claims the benefit of U.S. Provisional Application No. 60/233,796, filed on Sep. 19, 2000, and 60/227,104, filed on Aug. 22, 2000; co-pending U.S. application Ser. No. 10/961,020, filed on Oct. 8, 2004, which is a continuation of U.S. application Ser. No. 09/965,631, filed on Sep. 27, 2001, abandoned, which claims the benefit of U.S. Provisional application No. 60/236,689, filed on Sep. 29, 2000; co-pending U.S. application Ser. No. 09/962,739, filed on Sep. 25, 2001, which claims the benefit of U.S. Provisional Application No. 60/236,690, filed on Sep. 29, 2000; co-pending U.S. application Ser. No. 09/969,515, filed on Oct. 2, 2001, which claims the benefit of U.S. Provisional Application No. 60/237,540, filed on Oct. 4, 2000; co-pending U.S. application Ser. No. 10/964,106, filed on Oct. 13, 2004, which is a continuation of U.S. application Ser. No. 10/020,733, filed on Oct. 30, 2001, abandoned, which claims the benefit of U.S. Provisional Application No. 60/244,939, filed on Nov. 1, 2000; co-pending U.S. application Ser. No. 10/919,124, filed on Aug. 16, 2004, which is a continuation of U.S. application Ser. No. 10/014,896, filed on Dec. 11, 2001, abandoned, which claims the benefit of U.S. Provisional Application No. 60/255,567, filed on Dec. 14, 2000; co-pending U.S. application Ser. No. 11/049,616, filed on Feb. 2, 2005, which is a continuation of U.S. application Ser. No. 10/022,710, filed on Dec. 13, 2001, abandoned, which claims the benefit of U.S. Provisional Application No. 60/259,033, filed on Dec. 28, 2000; co-pending U.S. application Ser. No. 11/025,651, filed on Dec. 29, 2004, which is a continuation of U.S. application Ser. No. 10/041,770, filed on Jan. 8, 2002, abandoned, which claims the benefit of U.S. Provisional Application No. 60/260,276, filed on Jan. 8, 2001; co-pending U.S. application Ser. No. 10/999,109, filed on Nov. 29, 2004, which is a continuation of U.S. application Ser. No. 10/044,807, filed on Jan. 11, 2002, abandoned, which claims the benefit of U.S. Provisional Application No. 60/261,684, filed on Jan. 12, 2001; co-pending U.S. application Ser. No. 10/078,592, filed on Feb. 19, 2002, which claims the benefit of U.S. Provisional Application No. 60/270,320, filed on Feb. 20, 2001; and co-pending U.S. application Ser. No. 10/990,935, filed on Nov. 17, 2004, which is a continuation of U.S. application Ser. No. 10/226,560, filed on Aug. 22, 2002, abandoned, which both claims the benefit of U.S. Provisional Application No. 60/314,049, filed on Aug. 22, 2001, and is a continuation-in-part of U.S. application Ser. No. 09/917,614, filed on Jul. 27, 2001, abandoned, which claims the benefit of U.S. Provisional Application No. 60/221,644, filed on Jul. 28, 2000; each of which is herein incorporated by reference in its entirety.

### 2.0 CROSS-REFERENCE TO SEQUENCE LISTING SUBMITTED ON COMPACT DISC

[0002] The present application contains a Sequence Listing of SEQ ID NOS:1-222, in file “SeqList.txt” (1,415,168 bytes), created on Aug. 30, 2005, submitted herewith on duplicate compact disc (Copy 1 and Copy 2), which is herein incorporated by reference in its entirety.

### 3.0 INTRODUCTION

[0003] The present invention relates to the discovery, identification, and characterization of novel human polynucleotides encoding proteins sharing sequence similarity with mammalian proteases, neurolysin proteins, and animal proteins having thrombospondin repeats. The invention encompasses the described polynucleotides, host cell expression systems, the encoded proteins, fusion proteins, polypeptides and peptides, antibodies to the encoded proteins and peptides, and genetically engineered animals that either lack or overexpress the disclosed polynucleotides, antagonists and agonists of the proteins, and other compounds that modulate the expression or activity of the proteins encoded by the disclosed polynucleotides, which can be used for diagnosis, drug screening, clinical trial monitoring, the treatment of diseases and disorders, and cosmetic or nutriceutical applications.

### 4.0 BACKGROUND OF THE INVENTION

[0004] Proteases are enzymes that mediate the proteolytic cleavage of protein substrates as part of degradation, maturation, and secretory pathways within the body. Proteases have been associated with, inter alia, regulating development, diabetes, obesity, modulating cellular processes, fertility, and infectious disease.

[0005] Calcium-dependent proteases, such as calpains, have been found in virtually every vertebrate cell that has been examined for their presence. The calpain system has at least three well-characterized protein members that are activated in response to changes in calcium concentration. These proteins include at least two calpains that are activated at different concentrations of calcium, and a calpastatin that specifically inhibits the two calpains. Various tissue/species specific cDNAs have been described that are homologous to the calpains. Given the near ubiquitous expression of calpains, they have been implicated in a wide variety of cellular functions including, but not limited to, cell proliferation and differentiation, signal transduction, processes involving interactions between the cell membrane and cytoskeleton, secretion, platelet aggregation, cytokinesis, and disease. Accordingly, calpains represent a key target for the regulation of a variety of biological pathways.

[0006] Carboxypeptidases are proteases that hydrolyze the peptide bonds at the carboxy-terminal end of a chain of amino acids, and have been identified in a wide variety of cell types and animals. Peptidases have been implicated in a wide variety of biological processes including, but not limited to, digestion, coagulation, diabetes, prostate cancer, gynecological disorders, neurological disorders, and obesity. Peptidases thus represent significant targets for regulatory control of a variety of physiological processes and pathways.

[0007] Thrombospondins are membrane bound or extracellular proteins that have been implicated in, inter alia, blood clotting, angiogenesis, diabetes, cell adhesion, inflammation, wound healing, cancer, and development. Proteins having thrombospondin repeats can act as receptors, secreted extracellular matrix proteins, and proteases.

[0008] Neurolysins are soluble proteins of the zinc metalloprotease family that bind and cleave protein substrates such as angiotensin or neurotensin (typically between proline and tyrosine residues). As such, neurolysins have been implicated in a number of biological processes and anomalies such as blood pressure regulation, kidney function, pain management, cardiac disease, natriuresis and diabetes.

[0009] Thus, proteases are proven drug targets.

### 5.0 SUMMARY OF THE INVENTION

[0010] The present invention relates to the discovery, identification, and characterization of nucleotides that encode novel human proteins, and the corresponding amino acid sequences of these proteins. The novel human proteins (NHPs), described for the first time herein, share structural similarity with animal proteases, and particularly: calcium dependent or calcium activated proteases, or calpains (SEQ ID NO:1-9); carboxypeptidases, especially carboxypeptidase B and carboxypeptidase A (SEQ ID NOS:10-22); carboxypeptidases, especially carboxypeptidase A, and particularly A1 or A2 (SEQ ID NOS:23-37); metalloproteinases such as ADAM-TS6 (see, e.g., Hurskainen et al., J. Biol Chem. 274:25555-25563, 1999), a zinc metalloproteinase (however these NHPs contain additional regions (exons) that make them unique) (SEQ ID NOS:38-62); trypsin-like proteases such as oviductin, plasminogen activators, and human plasma kallikrein precursor (SEQ ID NOS:63-69); trypsin-like serine proteases such as enteropeptidase (enterokinase), plasminogen, and acrosin (SEQ ID NOS:70-76); aminopeptidases, particularly aminopeptidase P (SEQ ID NOS:77-103); proteins having thrombospondin repeats, such as proteinases, thrombospondin-1, F-spondin, ADAMTS metalloproteases, Tango-71, and distintegrins (SEQ ID NOS:104-120); neurolysins and angiotensin-binding proteins (SEQ ID NOS:121-123); serine proteases (SEQ ID NOS:124-126); thrombospondins (via tsp1 repeats), semaphorins, metalloproteinases, and a serine palmitoyltransferase (SEQ ID NOS:127-132); metalloproteinases (especially zinc metalloproteases of the ADAMTS family), thrombospondin repeat proteins, disintegrins, and aggrecanases (SEQ ID NOS:133-137); metalloproteinases (especially zinc metalloproteases of the ADAMTS family), proteases having thrombospondin repeats, disintegrins, aggrecanases, and procollagen I N-proteinase (SEQ ID NOS:138-170 and 176-188); calpains and calcium-dependant neutral proteases (SEQ ID NOS:171-175); meltrin-beta and ADAM 19 (SEQ ID NOS:189-197); carboxypeptidases, as well as aminoacylases, desuccinylases, deacetylases, and amidohydrolases (SEQ ID NOS:198-201); membrane proteins containing multiple thrombospondin repeats, such as cell adhesion proteins, as well as semaphorins, and a variety of cell surface markers and receptors (SEQ ID NOS:202-208); matrix metalloproteases, zinc dependent metalloproteases, and the ADAMTS family of secreted proteases (SEQ ID NOS:209-211); matrix metalloproteases, zinc dependent metalloproteases, ADAMTS family metalloproteases, collagenases, as well as receptor-linked phosphatases and membrane associated cell adhesion proteins (SEQ ID NOS:212 and 213); matrix metalloproteases, zinc dependent metalloproteases, and bone morphogenetic protein (SEQ ID NOS:214-216); and disintegrins and zinc metalloproteases of the ADAM family, more particularly those of the ADAM-TS family (SEQ ID NO:217-222). Accordingly, the described NHPs encode novel protease proteins with a range of homologues and orthologs that transcend phyla and a broad range of species.

[0011] The novel human nucleic acid (cDNA) sequences described herein encode proteins/open reading frames (ORFs) of 739, 723, 702, 686, 47, 88, 247, 92, 437, 350, 351, 314, 436, 399, 351, 314, 69, 908, 292, 468, 310, 507, 589, 141, 317, 159, 356, 438, 757, 306, 302, 164, 217, 348, 288, 507, 69, 290, 265, 211, 267, 186, 242, 453, 532, 428, 509, 484, 1691, 446, 372, 724, 650, 845, 771, 1617, 704, 346, 464, 164, 311, 491, 1224, 451, 297, 486, 1222, 1219, 1216, 1213, 1235, 1232, 1252, 1249, 1907, 321, 950, 367, 669, 353, 1224, 980, 476, 1213, 969, 465, 926, 918, 963, 955, 502, 361, 1465, 1590, 1606, 877, 1762, 436, 862, and 509 amino acids in length (SEQ ID NOS:2, 4, 6, 8, 11, 13, 15, 17, 19, 21, 24, 26, 28, 30, 32, 34, 36, 39, 41, 43, 45, 47, 49, 51, 53, 55, 57, 59, 61, 64, 66, 68, 71, 73, 75, 78, 80, 82, 84, 86, 88, 90, 92, 94, 96, 98, 100, 102, 105, 107, 109, 111, 113, 115, 117, 119, 122, 125, 128, 130, 132, 134, 136, 139, 141, 143, 145, 147, 149, 151, 153, 155, 157, 159, 162, 165, 167, 169, 172, 174, 177, 179, 181, 183, 185, 187, 190, 192, 194, 196, 199, 201, 203, 205, 207, 210, 213, 215, 218, and 221, respectively). SEQ ID NOS:9, 22, 37, 62, 69, 76, 103, 120, 123, 126, 137, 160, 163, 170, 175, 188, 197, 208, 211, 216, 219, and 222 describe NHP ORFs and flanking regions.

[0012] The invention also encompasses agonists and antagonists of the described NHPs, including small molecules, large molecules, mutant NHPs (or portions thereof) that compete with native NHPs, peptides, and antibodies, as well as nucleotide sequences that can be used to inhibit the expression of the described NHPs (e.g., antisense and ribozyme molecules, and open reading frame or regulatory sequence replacement constructs) or to enhance the expression of the described NHPs (e.g., expression constructs that place the described polynucleotide under the control of a strong promoter system), and transgenic animals that express an NHP sequence, or “knock-outs” (which can be conditional) that do not express a functional NHP. Knock-out mice can be produced in several ways, one of which involves the use of mouse embryonic stem cell (“ES cell”) lines that contain gene trap mutations in a murine homolog of at least one of the described NHPs. When the unique NHP sequences described in SEQ ID NOS:1-222 are “knocked-out” they provide a method of identifying phenotypic expression of the particular gene, as well as a method of assigning function to previously unknown genes. In addition, animals in which the unique NHP sequences described in SEQ ID NOS:1-222 are “knocked-out” provide an unique source in which to elicit antibodies to homologous and orthologous proteins, which would have been previously viewed by the immune system as “self” and therefore would have failed to elicit significant antibody responses.

[0013] Additionally, the unique NHP sequences described in SEQ ID NOS:1-222 are useful for the identification of protein coding sequences, and mapping an unique gene to a particular chromosome. These sequences identify biologically verified exon splice junctions, as opposed to splice junctions that may have been bioinformatically predicted from genomic sequence alone. The sequences of the present invention are also useful as additional DNA markers for restriction fragment length polymorphism (RFLP) analysis, and in forensic biology, particularly given the presence of nucleotide polymorphisms within the described sequences.

[0014] Further, the present invention also relates to processes for identifying compounds that modulate, i.e., act as agonists or antagonists of, NHP expression and/or NHP activity that utilize purified preparations of the described NHPs and/or NHP products, or cells expressing the same. Such compounds can be used as therapeutic agents for the treatment of any of a wide variety of symptoms associated with biological disorders or imbalances.

### 6.0 BRIEF DESCRIPTION OF THE FIGURES

[0015] No Figures are required in the present invention.

### 7.0 DETAILED DESCRIPTION OF THE INVENTION

[0016] The NHPs described for the first time herein are novel proteins that are expressed in, inter alia, human cell lines, and: human prostate and testis cells (SEQ ID NOS:1-9); human brain, pituitary, spinal cord, thymus, spleen, lymph node, bone marrow, trachea, lung, kidney, prostate, testis, thyroid, adrenal gland, stomach, small intestine colon, skeletal muscle, uterus, mammary gland, bladder, and cervix cells (SEQ ID NOS:10-22); human prostate, testis, and placenta cells (SEQ ID NOS:23-37); human fetal brain, brain, thymus, spleen, lymph node, trachea, kidney, fetal liver, testis, thyroid, adrenal gland, stomach, small intestine, uterus, placenta, adipose, esophagus, bladder, cervix, rectum, pericardium, ovary, and fetal lung cells (SEQ ID NOS:38-62); human thymus, trachea, kidney, prostate, testis, thyroid, salivary gland, stomach, placenta, mammary gland, adipose, skin, esophagus, bladder, pericardium, and fetal kidney cells (SEQ ID NOS:63-69); human testis cells (SEQ ID NOS:70-76); human fetal brain, brain, pituitary, cerebellum, spinal cord, thymus, spleen, lymph node, bone marrow, trachea, kidney, fetal liver, liver, prostate, testis, thyroid, adrenal gland, pancreas, salivary gland, stomach, small intestine, colon, uterus, placenta, mammary gland, adipose, skin, esophagus, bladder, cervix, rectum, pericardium, hypothalamus, ovary, fetal kidney, and fetal lung cells (SEQ ID NOS:77-103); human pituitary, lymph node, prostate, testis, adrenal gland, uterus, fetal kidney, fetal lung, and gene trapped human cells (SEQ ID NOS:104-120); human fetal brain, brain, cerebellum, spinal cord, thymus, trachea, kidney, fetal liver, liver, prostate, testis, adrenal gland, pancreas, salivary gland, stomach, small intestine, colon, skeletal muscle, uterus, mammary gland, esophagus, bladder, cervix, rectum, pericardium, hypothalamus, and gene trapped human cell lines (SEQ ID NOS:121-123); human brain, cerebellum, spinal cord, thymus, kidney, testis, adrenal gland, salivary gland, skeletal muscle, and gene trapped human cells (SEQ ID NOS:124-126); human brain, fetal brain, pituitary, cerebellum, spinal cord, thymus, spleen, trachea, kidney, liver, thyroid, adrenal gland, salivary gland, heart, uterus, stomach, small intestine, placenta, mammary gland, adipose, skin, esophagus, cervix, pericardium, fetal lung, and gene trapped human cells (SEQ ID NOS:127-132); human fetal brain, brain, pituitary, cerebellum, spinal cord, thymus, lymph node, trachea, kidney, fetal liver, prostate, testis, thyroid, adrenal gland, pancreas, small intestine, colon, skeletal muscle, heart, uterus, mammary gland, adipose, esophagus, bladder, cervix, pericardium, ovary, fetal kidney, and fetal lung cells (SEQ ID NOS:133-137); human spinal cord, lymph node, bone marrow, trachea, mammary gland, skeletal muscle, pericardium, adipose, esophagus, bladder, fetal kidney, and fetal lung cells (SEQ ID NOS:138-160); human heart, fetal kidney and fetal lung cells (SEQ ID NOS:161-163); human fetal brain, pituitary, cerebellum, spinal cord, lymph node, kidney, fetal liver, liver, prostate, testis, thyroid, adrenal gland, stomach, small intestine, colon, mammary gland, skeletal muscle, heart, uterus, placenta, pericardium, adipose, esophagus, cervix, rectum, ovary, fetal kidney, and fetal lung cells (SEQ ID NOS:164-170); human brain, trachea, kidney, prostate, testis, pancreas, stomach, small intestine, colon, skeletal muscle, mammary gland, adipose, esophagus, cervix, rectum, pericardium, hypothalamus, lymph node, fetal kidney, and fetal lung cells (SEQ ID NOS:171-175); human fetal brain, brain, pituitary, kidney, fetal liver, liver, prostate, testis, thyroid, adrenal gland, salivary gland, stomach, small intestine, colon, skeletal muscle, heart, placenta, mammary gland, adipose, esophagus, trachea, cervix, rectum, pericardium, hypothalamus, ovary, fetal kidney, and fetal lung cells (SEQ ID NOS:176-188); human fetal brain, brain, pituitary, cerebellum, spinal cord, thymus, spleen, lymph node, bone marrow, trachea, lung, kidney, fetal liver, liver, prostate, testis, adrenal gland, pancreas, salivary gland, stomach, small intestine, colon, skeletal muscle, heart, uterus, placenta, mammary gland, skin, adipose, esophagus, bladder, cervix, rectum, hypothalamus, ovary, fetal kidney, gall bladder, tongue, carcinoma cells, umbilical vein, endothelium, and fetal lung cells (SEQ ID NOS:189-197); human fetal brain, pituitary, thymus, lymph node, kidney, testis, adrenal gland, pancreas, placenta, skin, fetal kidney, fetal lung, and 9 week old embryo cells (SEQ ID NOS:198-201); human fetal brain, pituitary gland, spinal cord, thymus, lymph node, bone marrow, trachea, lung, kidney, fetal liver, liver, prostate, testis, thyroid, adrenal gland, stomach, small intestine, colon, skeletal muscle, uterus, placenta, mammary gland, adipose, skin, bladder, pericardium, ovary, fetal kidney, fetal lung, gall bladder, tongue, 6- and 9-week old embryos, and embryonic carcinoma cells (SEQ ID NOS:202-208); human pituitary, lymph node, bone marrow, small intestine, colon, skeletal muscle, uterus, placenta, mammary gland, bladder, cervix, fetal kidney, fetal lung, 12-week old embryos, adenocarcinoma, and osteosarcoma cells (SEQ ID NOS:209-211); human fetal brain, brain, pituitary, cerebellum, spinal cord, thymus, lymph node, trachea, lung, kidney, fetal liver, prostate, testis, thyroid, adrenal gland, stomach, small intestine, colon, skeletal muscle, heart, uterus, placenta, mammary gland, adipose, skin, esophagus, bladder, cervix, rectum, pericardium, ovary, fetal kidney, fetal lung, gall bladder, aorta, 6-, 9-, and 12-week old embryos, osteosarcoma, umbilical vein, and microvascular endothelial cells (SEQ ID NOS:212 and 213); human lymph node, mammary gland, and fetal kidney cells (SEQ ID NOS:214-216); and human pituitary and cerebellum (SEQ ID NOS:217-222).

[0017] The described sequences were compiled from: gene trapped cDNAs and clones isolated from a human testis cDNA library (SEQ ID NOS:1-9); gene trapped cDNAs and a clone isolated from a human prostate cDNA library (SEQ ID NOS:10-22); gene trapped cDNAs and clones isolated from a human testis cDNA library (SEQ ID NOS:23-37); gene trapped cDNAs and clones isolated from human testis and placenta cDNA libraries (SEQ ID NOS:38-62); gene trapped cDNAs and clones isolated from a human kidney cDNA library (SEQ ID NOS:63-69); gene trapped cDNAs and clones isolated from a human testis cDNA library (SEQ ID NOS:70-76); gene trapped cDNAs and clones isolated from a human testis cDNA library (SEQ ID NOS:77-103); clustered human gene trapped sequences, ESTs, and cDNA isolated from human lymph node, pituitary, placenta, trachea and mammary gland cDNA cell libraries (SEQ ID NOS:104-120); by aligning human EST sequences and cDNA clones from a HUVEC cDNA library (SEQ ID NOS:121-123); gene trapped cDNAs and cDNAs prepared and isolated from human brain, cerebellum, testis, kidney, skeletal muscle, thymus, and salivary gland mRNA (SEQ ID NOS:124-126); clustered human gene trapped sequences, and cDNA products isolated from human skeletal muscle, mammary gland, uterus, and kidney mRNAs (SEQ ID NOS:127-132); cDNA clones, genomic sequence, and cDNAs derived from human kidney, mammary gland, and cerebellum mRNAs (SEQ ID NOS:133-137); cDNA clones, genomic sequence, and cDNAs derived from human lymph node, thyroid, fetal brain, bone marrow, trachea, kidney, and mammary gland mRNAs (SEQ ID NOS:138-163); cDNA clones, genomic sequence, and cDNAs derived from human kidney, lymph node, pituitary, and thymus mRNAs (SEQ ID NOS:164-170); cDNA clones, genomic sequence, and cDNAs derived from human kidney and testis mRNAs (SEQ ID NOS:171-175); sequence tags, genomic sequence, and cDNAs derived from human placenta, fetal tissue, prostate, thymus, and uterus mRNAs (SEQ ID NOS:176-188); cDNA clones, genomic sequence, and cDNAs derived from human fetal brain, testis, mammary gland, placenta, adipose, uterus, skeletal muscle, fetus, kidney, brain, thymus, and adrenal gland mRNAs (SEQ ID NOS:189-197); cDNA clones, genomic sequence, and cDNAs derived from human thymus, kidney, and lymph node mRNAs (SEQ ID NOS:198-201); genomic sequence and cDNAs from human testis, pituitary, mammary gland, placenta, thymus, fetus, and skeletal muscle mRNAs (SEQ ID NOS:202-208); cDNAs prepared and isolated from human adrenal gland and placenta mRNAs (SEQ ID NOS:209-211); cDNAs prepared and isolated from human lymph node, kidney, and prostate mRNAs (SEQ ID NOS:212 and 213); cDNAs prepared and isolated from human lymph node, mammary gland, and brain mRNAs (SEQ ID NOS:214-216); and cDNAs prepared and isolated from brain mRNA (SEQ ID NOS:217-222). The cDNA libraries were purchased from Clontech (Palo Alto, Calif.) and/or Edge Biosystems (Gaithersburg, Md.).

[0018] Because of their medical importance, aminoopeptidases, carboxypeptidases, disintegrins, thrombospondins, proteases and metalloproteases similar to the described NHPs have been studied by others, as exemplified in U.S. Pat. Nos. 5,922,546, 5,593,674, 5,155,038, 5,981,222, 6,013,781, 5,972,680, and 5,656,603 (chemical antagonists of aminopeptidase P), which further describe a variety of uses that are also applicable to the described NHPs.

[0019] The present invention encompasses the nucleotides presented in the Sequence Listing, host cells expressing such nucleotides, the expression products of such nucleotides, and: (a) nucleotides that encode mammalian homologs of the described nucleotides, including the specifically described NHPs, and the NHP products; (b) nucleotides that encode one or more portions of the NHPs that correspond to functional domains, and the polypeptide products specified by such nucleotide sequences, including, but not limited to, the novel regions of any active domain(s); (c) isolated nucleotides that encode mutant versions, engineered or naturally occurring, of the described NHPs, in which all or a part of at least one domain is deleted or altered, and the polypeptide products specified by such nucleotide sequences, including, but not limited to, soluble proteins and peptides in which all or a portion of the signal sequence is deleted; (d) nucleotides that encode chimeric fusion proteins containing all or a portion of a coding region of an NHP, or one of its domains (e.g., a receptor or ligand binding domain, accessory protein/self-association domain, etc.) fused to another peptide or polypeptide; or (e) therapeutic or diagnostic derivatives of the described polynucleotides, such as oligonucleotides, antisense polynucleotides, ribozymes, dsRNA, or gene therapy constructs comprising a sequence first disclosed in the Sequence Listing.

[0020] As discussed above, the present invention includes the human DNA sequences presented in the Sequence Listing (and vectors comprising the same), and additionally contemplates any nucleotide sequence encoding a contiguous NHP open reading frame (ORF) that hybridizes to a complement of a DNA sequence presented in the Sequence Listing under highly stringent conditions, e.g., hybridization to filter-bound DNA in 0.5 M NaHPO₄, 7% sodium dodecyl sulfate (SDS), 1 mM EDTA at 65° C., and washing in 0.1×SSC/0.1% SDS at 68° C. (“Current Protocols in Molecular Biology”, Vol. 1, p. 2.10.3 (Ausubel et al., eds., Green Publishing Associates, Inc., and John Wiley & Sons, Inc., New York, 1989)) and encodes a functionally equivalent expression product. Additionally contemplated are any nucleotide sequences that hybridize to the complement of a DNA sequence that encodes and expresses an amino acid sequence presented in the Sequence Listing under moderately stringent conditions, e.g., washing in 0.2×SSC/0.1% SDS at 42° C. (“Current Protocols in Molecular Biology”, supra), yet still encode a functionally equivalent NHP product. Functional equivalents of the NHPs include naturally occurring NHPs present in other species, and mutant NHPs, whether naturally occurring or engineered (by site directed mutagenesis, gene shuffling, directed evolution as described in, for example, U.S. Pat. Nos. 5,837,458 and 5,830,721). The invention also includes degenerate nucleic acid variants of the disclosed NHP polynucleotide sequences.

[0021] Additionally contemplated are polynucleotides encoding an NHP ORF, or its functional equivalent, encoded by a polynucleotide sequence that is about 99, 95, 90, or about 85 percent similar or identical to corresponding regions of the nucleotide sequences of the Sequence Listing (as measured by BLAST sequence comparison analysis using, for example, the GCG sequence analysis package (the University of Wisconsin GCG sequence analysis package, SEQUENCHER 3.0, Gene Codes Corp., Ann Arbor, Mich.) using default parameters).

[0022] The invention also includes nucleic acid molecules, preferably DNA molecules, that hybridize to, and are therefore the complements of, the described NHP nucleotide sequences. Such hybridization conditions may be highly stringent or less highly stringent, as described herein. In instances where the nucleic acid molecules are deoxyoligonucleotides (“DNA oligos”), such molecules are generally about 16 to about 100 bases long, or about 20 to about 80 bases long, or about 34 to about 45 bases long, or any variation or combination of sizes represented therein that incorporate a contiguous region of sequence first disclosed in the Sequence Listing. Such oligonucleotides can be used in conjunction with the polymerase chain reaction (PCR) to screen libraries, isolate clones, and prepare cloning and sequencing templates, etc.

[0023] Alternatively, such NHP oligonucleotides can be used as hybridization probes for screening libraries, and assessing gene expression patterns (particularly using a microarray or high-throughput “chip” format). Additionally, a series of NHP oligonucleotide sequences, or the complements thereof, can be used to represent all or a portion of the described NHP sequences. An oligonucleotide or polynucleotide sequence first disclosed in at least a portion of one or more of the sequences of SEQ ID NOS:1-222 can be used as a hybridization probe in conjunction with a solid support matrix/substrate (resins, beads, membranes, plastics, polymers, metal or metallized substrates, crystalline or polycrystalline substrates, etc.). Of particular note are spatially addressable arrays (i.e., gene chips, microtiter plates, etc.) of oligonucleotides and polynucleotides, or corresponding oligopeptides and polypeptides, wherein at least one of the biopolymers present on the spatially addressable array comprises an oligonucleotide or polynucleotide sequence first disclosed in at least one of the sequences of SEQ ID NOS:1-222, or an amino acid sequence encoded thereby. Methods for attaching biopolymers to, or synthesizing biopolymers on, solid support matrices, and conducting binding studies thereon, are disclosed in, inter alia, U.S. Pat. Nos. 5,700,637, 5,556,752, 5,744,305, 4,631,211, 5,445,934, 5,252,743, 4,713,326, 5,424,186, and 4,689,405.

[0024] Addressable arrays comprising sequences first disclosed in SEQ ID NOS:1-222 can be used to identify and characterize the temporal and tissue specific expression of a gene. These addressable arrays incorporate oligonucleotide sequences of sufficient length to confer the required specificity, yet be within the limitations of the production technology. The length of these probes is usually within a range of between about 8 to about 2000 nucleotides. Preferably the probes consist of 60 nucleotides, and more preferably 25 nucleotides, from the sequences first disclosed in SEQ ID NOS:1-222.

[0025] For example, a series of NHP oligonucleotide sequences, or the complements thereof, can be used in chip format to represent all or a portion of the described sequences. The oligonucleotides, typically between about 16 to about 40 (or any whole number within the stated range) nucleotides in length, can partially overlap each other, and/or the sequence may be represented using oligonucleotides that do not overlap. Accordingly, the described polynucleotide sequences shall typically comprise at least about two or three distinct oligonucleotide sequences of at least about 8 nucleotides in length that are each first disclosed in the described Sequence Listing. Such oligonucleotide sequences can begin at any nucleotide present within a sequence in the Sequence Listing, and proceed in either a sense (5′-to-3′) orientation vis-a-vis the described sequence or in an antisense orientation.

[0026] Microarray-based analysis allows the discovery of broad patterns of genetic activity, providing new understanding of gene functions, and generating novel and unexpected insight into transcriptional processes and biological mechanisms. The use of addressable arrays comprising sequences first disclosed in SEQ ID NOS:1-222 provides detailed information about transcriptional changes involved in a specific pathway, potentially leading to the identification of novel components, or gene functions that manifest themselves as novel phenotypes.

[0027] Probes consisting of sequences first disclosed in SEQ ID NOS:1-222 can also be used in the identification, selection, and validation of novel molecular targets for drug discovery. The use of these unique sequences permits the direct confirmation of drug targets, and recognition of drug dependent changes in gene expression that are modulated through pathways distinct from the intended target of the drug. These unique sequences therefore also have utility in defining and monitoring both drug action and toxicity.

[0028] As an example of utility, the sequences first disclosed in SEQ ID NOS:1-222 can be utilized in microarrays, or other assay formats, to screen collections of genetic material from patients who have a particular medical condition. These investigations can also be carried out using the sequences first disclosed in SEQ ID NOS:1-222 in silico, and by comparing previously collected genetic databases and the disclosed sequences using computer software known to those in the art.

[0029] Thus the sequences first disclosed in SEQ ID NOS:1-222 can be used to identify mutations associated with a particular disease, and also in diagnostic or prognostic assays.

[0030] Although the presently described sequences have been specifically described using nucleotide sequence, it should be appreciated that each of the sequences can uniquely be described using any of a wide variety of additional structural attributes, or combinations thereof. For example, a given sequence can be described by the net composition of the nucleotides present within a given region of the sequence, in conjunction with the presence of one or more specific oligonucleotide sequence(s) first disclosed in SEQ ID NOS:1-222. Alternatively, a restriction map specifying the relative positions of restriction endonuclease digestion sites, or various palindromic or other specific oligonucleotide sequences, can be used to structurally describe a given sequence. Such restriction maps, which are typically generated by widely available computer programs (e.g., the University of Wisconsin GCG sequence analysis package, SEQUENCHER 3.0, Gene Codes Corp., etc.), can optionally be used in conjunction with one or more discrete nucleotide sequence(s) present in the sequence that can be described by the relative position of the sequence relative to one or more additional sequence(s) or one or more restriction sites present in the disclosed sequence.

[0031] For oligonucleotide probes, highly stringent conditions may refer, e.g., to washing in 6×SSC/0.05% sodium pyrophosphate at 37° C. (for 14-base oligos), 48° C. (for 17-base oligos), 55° C. (for 20-base oligos), and 60° C. (for 23-base oligos). These nucleic acid molecules may encode or act as NHP antisense molecules, useful, for example, in NHP gene regulation and/or as antisense primers in amplification reactions of NHP nucleic acid sequences. With respect to NHP gene regulation, such techniques can be used to regulate biological functions. Further, such sequences may be used as part of ribozyme and/or triple helix sequences that are also useful for NHP gene regulation.

[0032] Inhibitory antisense or double stranded oligonucleotides can additionally comprise at least one modified base moiety that is selected from the group including, but not limited to, 5-fluorouracil, 5-bromouracil, 5-chlorouracil, 5-iodouracil, hypoxanthine, xanthine, 4-acetylcytosine, 5-(carboxyhydroxylmethyl)uracil, 5-carboxymethylaminomethyl-2-thiouridine, 5-carboxymethylaminomethyluracil, dihydrouracil, beta-D-galactosylqueosine, inosine, N6-isopentenyladenine, 1-methylguanine, 1-methylinosine, 2,2-dimethylguanine, 2-methyladenine, 2-methylguanine, 3-methylcytosine, 5-methylcytosine, N6-adenine, 7-methylguanine, 5-methylaminomethyluracil, 5-methoxyaminomethyl-2-thiouracil, beta-D-mannosylqueosine, 5′-methoxycarboxymethyluracil, 5-methoxyuracil, 2-methylthio-N6-isopentenyladenine, uracil-5-oxyacetic acid (v), wybutoxosine, pseudouracil, queosine, 2-thiocytosine, 5-methyl-2-thiouracil, 2-thiouracil, 4-thiouracil, 5-methyluracil, uracil-5-oxyacetic acid methylester, 3-(3-amino-3-N-2-carboxypropyl) uracil, (acp3)w, and 2,6-diaminopurine.

[0033] The antisense oligonucleotide can also comprise at least one modified sugar moiety selected from the group including, but not limited to, arabinose, 2-fluoroarabinose, xylulose, and hexose.

[0034] In yet another embodiment, the antisense oligonucleotide will comprise at least one modified phosphate backbone selected from the group including, but not limited to, a phosphorothioate, a phosphorodithioate, a phosphoramidothioate, a phosphoramidate, a phosphordiamidate, a methylphosphonate, an alkyl phosphotriester, and a formacetal or analog thereof.

[0035] In yet another embodiment, the antisense oligonucleotide is an α-anomeric oligonucleotide. An α-anomeric oligonucleotide forms specific double-stranded hybrids with complementary RNA in which, contrary to the usual β-units, the strands run parallel to each other (Gautier et al., Nucl. Acids Res. 15:6625-6641, 1987). The oligonucleotide is a 2′-0-methylribonucleotide (Inoue et al., Nucl. Acids Res. 15:6131-6148, 1987), or a chimeric RNA-DNA analogue (Inoue et al., FEBS Lett. 215:327-330, 1987). Alternatively, double stranded RNA can be used to disrupt the expression and function of a targeted NHP.

[0036] Oligonucleotides of the invention can be synthesized by standard methods known in the art, e.g., by use of an automated DNA synthesizer (such as are commercially available from Biosearch, Applied Biosystems, etc.). As examples, phosphorothioate oligonucleotides can be synthesized by the method of Stein et al. (Nucl. Acids Res. 16:3209-3221, 1988), and methylphosphonate oligonucleotides can be prepared by use of controlled pore glass polymer supports (Sarin et al., Proc. Natl. Acad. Sci. USA 85:7448-7451, 1988), etc.

[0037] Low stringency conditions are well-known to those of skill in the art, and will vary predictably depending on the specific organisms from which the library and the labeled sequences are derived. For guidance regarding such conditions, see, for example, “Molecular Cloning, A Laboratory Manual” (Sambrook et al., eds., Cold Spring Harbor Press, Cold Spring Harbor, N.Y., 1989), “Current Protocols in Molecular Biology”, supra, and periodic updates thereof.

[0038] Alternatively, suitably labeled NHP nucleotide probes can be used to screen a human genomic library using appropriately stringent conditions or by PCR. The identification and characterization of human genomic clones is helpful for identifying polymorphisms (including, but not limited to, nucleotide repeats, microsatellite alleles, single nucleotide polymorphisms, or coding single nucleotide polymorphisms), determining the genomic structure of a given locus/allele, and designing diagnostic tests. For example, sequences derived from regions adjacent to the intron/exon boundaries of the human gene can be used to design primers for use in amplification assays to detect mutations within the exons, introns, splice sites (e.g., splice acceptor and/or donor sites), etc., that can be used in diagnostics and pharmacogenomics.

[0039] For example, the present sequences can be used in restriction fragment length polymorphism (RFLP) analysis to identify specific individuals. In this technique, an individual's genomic DNA is digested with one or more restriction enzymes, and probed on a Southern blot to yield unique bands for identification (as generally described in U.S. Pat. No. 5,272,057). In addition, the sequences of the present invention can be used to provide polynucleotide reagents, e.g., PCR primers, targeted to specific loci in the human genome, which can enhance the reliability of DNA-based forensic identifications by, for example, providing another “identification marker” (i.e., another DNA sequence that is unique to a particular individual). Actual base sequence information can be used for identification as an accurate alternative to patterns formed by restriction enzyme generated fragments.

[0040] Further, an NHP homolog can be isolated from nucleic acid from an organism of interest by performing PCR using two degenerate or “wobble” oligonucleotide primer pools designed on the basis of amino acid sequences within the NHP products disclosed herein. The template for the reaction may be genomic DNA, or total RNA, mRNA, and/or cDNA obtained by reverse transcription of mRNA, prepared from human or non-human cell lines or tissue known to express, or suspected of expressing, an allele of an NHP gene. The PCR product can be subcloned and sequenced to ensure that the amplified sequences represent the sequence of the desired NHP gene. The PCR fragment can then be used to isolate a full length cDNA clone by a variety of methods. For example, the amplified fragment can be labeled and used to screen a cDNA library, such as a bacteriophage cDNA library. Alternatively, the labeled fragment can be used to isolate genomic clones via the screening of a genomic library.

[0041] PCR technology can also be used to isolate full length cDNA sequences. For example, RNA can be isolated, following standard procedures, from an appropriate cellular or tissue source (i.e., one known to express, or suspected of expressing, an NHP gene, such as, for example, testis, kidney, lymph node, pituitary or brain tissue). A reverse transcription (RT) reaction can be performed on the RNA using an oligonucleotide primer specific for the most 5′ end of the amplified fragment for the priming of first strand synthesis. The resulting RNA/DNA hybrid may then be “tailed” using a standard terminal transferase reaction, the hybrid may be digested with RNase H, and second strand synthesis may then be primed with a complementary primer. Thus, cDNA sequences upstream of the amplified fragment can be isolated. For a review of cloning strategies that can be used, see, e.g., “Molecular Cloning, A Laboratory Manual”, supra.

[0042] A cDNA encoding a mutant NHP sequence can be isolated, for example, by using PCR. In this case, the first cDNA strand may be synthesized by hybridizing an oligo-dT oligonucleotide to mRNA isolated from tissue known to express, or suspected of expressing, an NHP, in an individual putatively carrying a mutant NHP allele, and by extending the new strand with reverse transcriptase. The second strand of the cDNA is then synthesized using an oligonucleotide that hybridizes specifically to the 5′ end of the normal sequence. Using these two primers, the product is then amplified via PCR, optionally cloned into a suitable vector, and subjected to DNA sequence analysis through methods well-known to those of skill in the art. By comparing the DNA sequence of the mutant NHP allele to that of a corresponding normal NHP allele, the mutation(s) responsible for the loss or alteration of function of the mutant NHP gene product can be ascertained.

[0043] Alternatively, a genomic library can be constructed using DNA obtained from an individual suspected of carrying, or known to carry, a mutant NHP allele (e.g., a person manifesting an NHP-associated phenotype such as, for example, altered white blood cell levels, obesity, vision disorders, high blood pressure, connective tissue disorders, arthritis, restenosis, behavioral disorders, colitis or spastic colon, asthma, depression, infertility, etc.), or a cDNA library can be constructed using RNA from a tissue known to express, or suspected of expressing, a mutant NHP allele. A normal NHP gene, or any suitable fragment thereof, can then be labeled and used as a probe to identify the corresponding mutant NHP allele in such libraries. Clones containing mutant NHP sequences can then be purified and subjected to sequence analysis according to methods well-known to those skilled in the art.

[0044] Additionally, an expression library can be constructed utilizing cDNA synthesized from, for example, RNA isolated from a tissue known to express, or suspected of expressing, a mutant NHP allele in an individual suspected of carrying, or known to carry, such a mutant allele. In this manner, gene products made by the putatively mutant tissue can be expressed and screened using standard antibody screening techniques in conjunction with antibodies raised against a normal NHP product, as described below (for screening techniques, see, for example, “Antibodies: A Laboratory Manual” (Harlow and Lane, eds., Cold Spring Harbor Press, Cold Spring Harbor, N.Y., 1988)).

[0045] Additionally, screening can be accomplished by screening with labeled NHP fusion proteins, such as, for example, alkaline phosphatase-NHP or NHP-alkaline phosphatase fusion proteins. In cases where an NHP mutation results in an expression product with altered function (e.g., as a result of a missense or a frameshift mutation), polyclonal antibodies to an NHP are likely to cross-react with a corresponding mutant NHP expression product. Library clones detected via their reaction with such labeled antibodies can be purified and subjected to sequence analysis according to methods well-known in the art.

[0046] The invention also encompasses: (a) DNA vectors that contain any of the foregoing NHP coding sequences and/or their complements (i.e., antisense); (b) DNA expression vectors that contain any of the foregoing NHP coding sequences operatively associated with a regulatory element that directs the expression of the coding sequences (for example, baculovirus as described in U.S. Pat. No. 5,869,336); (c) genetically engineered host cells that contain any of the foregoing NHP coding sequences operatively associated with a regulatory element that directs the expression of the coding sequences in the host cell; and (d) genetically engineered host cells that express an endogenous NHP sequence under the control of an exogenously introduced regulatory element (i.e., gene activation). As used herein, regulatory elements include, but are not limited to, inducible and non-inducible promoters, enhancers, operators, and other elements known to those skilled in the art that drive and regulate expression. Such regulatory elements include, but are not limited to, the cytomegalovirus (hCMV) immediate early gene, regulatable, viral elements (particularly retroviral LTR promoters), the early or late promoters of SV40 or adenovirus, the lac system, the trp system, the TAC system, the TRC system, the major operator and promoter regions of phage lambda, the control regions of fd coat protein, the promoter for 3-phosphoglycerate kinase (PGK), the promoters of acid phosphatase, and the promoters of the yeast α-mating factors.

[0047] The present invention also encompasses antibodies and anti-idiotypic antibodies (including Fab fragments), antagonists and agonists of an NHP, as well as compounds or nucleotide constructs that inhibit expression of an NHP sequence (transcription factor inhibitors, antisense and ribozyme molecules, or open reading frame sequence or regulatory sequence replacement constructs), or promote the expression of an NHP (e.g., expression constructs in which NHP coding sequences are operatively associated with expression control elements such as promoters, promoter/enhancers, etc.).

[0048] The NHPs or NHP peptides, NHP fusion proteins, NHP nucleotide sequences, antibodies, antagonists and agonists can be useful for the detection of mutant NHPS, or inappropriately expressed NHPs, for the diagnosis of disease. The NHP proteins or peptides, NHP fusion proteins, NHP nucleotide sequences, host cell expression systems, antibodies, antagonists, agonists and genetically engineered cells and animals can be used for screening for drugs (or high throughput screening of combinatorial libraries) effective in the treatment of the symptomatic or phenotypic manifestations of perturbing the normal function of an NHP in the body. The use of engineered host cells and/or animals may offer an advantage in that such systems allow not only for the identification of compounds that bind to an endogenous receptor for an NHP, but can also identify compounds that trigger NHP-mediated activities or pathways.

[0049] Finally, the NHP products can be used as therapeutics. For example, soluble derivatives, such as NHP peptides/domains corresponding to an NHP, NHP fusion protein products (especially NHP-Ig fusion proteins, i.e., fusions of an NHP, or a domain of an NHP, to an IgFc), NHP antibodies and anti-idiotypic antibodies (including Fab fragments), antagonists or agonists (including compounds that modulate or act on downstream targets in an NHP-mediated pathway), can be used to directly treat diseases or disorders. For instance, the administration of an effective amount of a soluble NHP, an NHP-IgFc fusion protein, or an anti-idiotypic antibody (or its Fab) that mimics an NHP, could activate or effectively antagonize an endogenous NHP receptor. Nucleotide constructs encoding such NHP products can be used to genetically engineer host cells to express such products in vivo; these genetically engineered cells function as “bioreactors” in the body delivering a continuous supply of an NHP, an NHP peptide, or an NHP fusion protein to the body. Nucleotide constructs encoding functional NHPs, mutant NHPs, as well as antisense and ribozyme molecules, can also be used in “gene therapy” approaches for the modulation of NHP expression. Thus, the invention also encompasses pharmaceutical formulations and methods for treating biological disorders.

[0050] Various aspects of the invention are described in greater detail in the subsections below.

### 7.1 NHP Nucleic Acid Sequences

[0051] The cDNA sequences and corresponding deduced amino acid sequences of the described NHPs (SEQ ID NOS:1-222) are presented in the Sequence Listing.

[0052] A number of polymorphisms were identified during the sequencing of the disclosed nucleic acid sequences, including: an A to G transition at nucleotide (nt) position 1474 of SEQ ID NOS:1 and 3, and nt position 1363 of SEQ ID NOS:5 and 7, which can result in a lysine or glutamate residue at corresponding amino acid (aa) position 492 of SEQ ID NOS:2 and 4, and aa position 455 of SEQ ID NOS:6 and 8; a C to T transition at nt position 1669 of SEQ ID NOS:1 and 3, and nt position 1558 of SEQ ID NOS:5 and 7, which can result in a glutamine residue or stop codon at corresponding aa position 557 of SEQ ID NOS:2 and 4, and aa position 520 of SEQ ID NOS:6 and 8; a T to A transversion at nt position 1673 of SEQ ID NOS:1 and 3, and nt position 1562 of SEQ ID NOS:5 and 7, which can result in a leucine or histidine residue at corresponding aa position 558 of SEQ ID NOS:2 and 4, and aa position 521 of SEQ ID NOS:6 and 8; a T to C transition at nt position 1007 of SEQ ID NOS:23, 27, and 31, and nt position 896 of SEQ ID NOS:25, 29, and 33, which can result in a leucine or serine residue at corresponding aa position 336 of SEQ ID NOS:24, 28, and 32, and aa position 299 of SEQ ID NOS:26, 30, and 34; a G to T transversion at nt position 1014 of SEQ ID NOS:23, 27, and 31, and nt position 903 of SEQ ID NOS:25, 29, and 33, which can result in a glutamate or aspartate residue at corresponding aa position 338 of SEQ ID NOS:24, 28, and 32, and aa position 301 of SEQ ID NOS:26, 30, and 34; a translationally silent T to C transition at nt position 1158 of SEQ ID NO:27; a translationally silent G to A transition at nt position 24 of SEQ ID NO:35 (denoted by an “r” in the Sequence Listing); a G/A polymorphism at nt position 68 of SEQ ID NO:63 and nt position 56 of SEQ ID NO:65 (denoted by an “r” in the Sequence Listing), which can result in an arginine or glutamine residue at corresponding aa position 23 of SEQ ID NO:64 and aa position 19 of SEQ ID NO:66; an A/G polymorphism at nt position 82 of SEQ ID NO:63 and nt position 70 of SEQ ID NO:65 (denoted by an “r” in the Sequence Listing), which can result in an alanine or threonine residue at corresponding aa position 28 of SEQ ID NO:64 and aa position 24 of SEQ ID NO:66; a translationally silent T/C polymorphism at nt position 28 of SEQ ID NO:72 (denoted by an “y” in the Sequence Listing); a T/C polymorphism at nt position 55 of SEQ ID NO:72 (denoted by an “y” in the Sequence Listing), which can result in a tyrosine or histidine residue at corresponding aa 19 of SEQ ID NO:73; a G/A polymorphism at nt position 379 of SEQ ID NO:72 and nt position 199 of SEQ ID NO:74 (denoted by an “r” in the Sequence Listing), which can result in an alanine or threonine residue at corresponding aa position 127 of SEQ ID NO:73 and aa position 67 of SEQ ID NO:75; a translationally silent C/T polymorphism at nt position 951 of SEQ ID NO:121 (denoted by a “y” in the Sequence Listing); a C/T polymorphism at nt position 2,110 of SEQ ID NO:121 (denoted by a “y” in the Sequence Listing), which can result in a proline or serine residue at corresponding aa position 704 of SEQ ID NO:122; a G/A transition at nt position 343 of SEQ ID NO:124 (denoted by an “r” in the Sequence Listing), which can result in a valine or isoleucine residue at corresponding aa position 115 of SEQ ID NO:125; a C/T transition at nt position 868 of SEQ ID NO:124 (denoted by a “y” in the Sequence Listing), which can result in a cysteine or arginine residue at corresponding aa position 290 of SEQ ID NO:125; an AA/GT polymorphism at nt positions 364 and 365 of SEQ ID NOS:127 and 131 (denoted by an “rw” in the Sequence Listing), which can result in an asparagine or valine residue at corresponding aa position 122 of SEQ ID NOS:128 and 132; an A/G polymorphism at nt position 535 of SEQ ID NOS:127 and 131 (denoted by an “r” in the Sequence Listing), which can result in a lysine or glutamate residue at corresponding aa position 179 of SEQ ID NOS:128 and 132; an A/G polymorphism at nt position 58 of SEQ ID NOS:140, 142, 144, 146, 148, 150, 152, 154, 156, and 158 (denoted by an “r” in the Sequence Listing), which can result in a threonine or alanine residue at corresponding aa position 20 of SEQ ID NOS:141, 143, 145, 147, 149, 151, 153, 155, 157, and 159; a CATT/GTCA polymorphism at nt positions 1114-1117 of SEQ ID NO:146 (denoted by an “swyw” in the Sequence Listing), which can result in a valine/threonine or histidine/serine dyad at corresponding aa positions 372 and 373 of SEQ ID NO:147; an A/C polymorphism at nt position 1538 of SEQ ID NOS:144, 146, 148, 150, 152, 154, 156, and 158 (denoted by an “m” in the Sequence Listing), which can result in a proline or glutamine residue at corresponding aa position 513 of SEQ ID NOS:145, 147, 149, 151, 153, 155, 157, and 159; a translationally silent T/C polymorphism at nt position 1542 of SEQ ID NOS:144, 146, 148, 150, 152, 154, 156, and 158 (denoted by an “y” in the Sequence Listing); a T/C polymorphism at nt position 1769 of SEQ ID NOS:144, 146, 148, 150, 152, 154, 156, and 158 (denoted by an “y” in the Sequence Listing), which can result in a proline or leucine residue at corresponding aa position 590 of SEQ ID NOS:145, 147, 149, 151, 153, 155, 157, and 159; a translationally silent C/G polymorphism at nt position 1869 of SEQ ID NOS:144, 146, 148, 150, 152, 154, 156, and 158 (denoted by an “s” in the Sequence Listing); a G/C polymorphism at nt position 1899 of SEQ ID NOS:144, 146, 148, 150, 152, 154, 156, and 158 (denoted by an “s” in the Sequence Listing), which can result in a serine or arginine residue at corresponding aa position 633 of SEQ ID NOS:145, 147, 149, 151, 153, 155, 157, and 159; a translationally silent A/G polymorphism at nt position 1965 of SEQ ID NOS:144, 146, 148, 150, 152, 154, 156, and 158 (denoted by an “r” in the Sequence Listing); a CATT/GTCA polymorphism at nt positions 2259-2262 of SEQ ID NOS:144, 146, 148, 150, 152, 154, 156, and 158 (denoted by an “swyw” in the Sequence Listing), which is translationally silent at corresponding aa position 753, and can result in a serine or isoleucine residue at corresponding aa position 754, of SEQ ID NOS:145, 147, 149, 151, 153, 155, 157, and 159; a G/A polymorphism at nt position 3050 of SEQ ID NOS:144, 146, 148, 150, 152, 154, 156, and 158 (denoted by an “r” in the Sequence Listing), which can result in a serine or asparagine residue at corresponding aa position 1017 of SEQ ID NOS:145, 147, 149, 151, 153, 155, 157, and 159; a G/A polymorphism at nt position 3146 of SEQ ID NOS:144, 146, 148, 150, 152, 154, 156, and 158 (denoted by an “r” in the Sequence Listing), which can result in a glycine or glutamate residue at corresponding aa position 1049 of SEQ ID NOS:145, 147, 149, 151, 153, 155, 157, and 159; an A/T polymorphism at nt position 286 of SEQ ID NO:161 (denoted by a “w” in the Sequence Listing), which can result in a serine or threonine residue at corresponding aa position 96 of SEQ ID NO:162; a translationally silent T/C polymorphism at nt position 3735 of SEQ ID NO:161 (denoted by a “y” in the Sequence Listing); a G/C polymorphism at nt position 491 of SEQ ID NOS:164, 166, and 168, which can result in a glycine or alanine residue at corresponding aa position 164 of SEQ ID NOS:165, 167, and 169; a T/G polymorphism at nt position 2598 of SEQ ID NO:166, which can result in a cysteine or tryptophan residue at corresponding aa position 866 of SEQ ID NO:167; an A/G polymorphism at nt position 838 of SEQ ID NOS:171 and 173, which can result in a threonine or alanine residue at corresponding aa position 280 of SEQ ID NOS:172 and 174; an A/T polymorphism at nt position 1006 of SEQ ID NOS:171 and 173, which can result in a threonine or serine residue at corresponding aa position 336 of SEQ ID NOS:172 and 174; a G/C polymorphism at nt position 1019 of SEQ ID NOS:171 and 173, which can result in a glycine or alanine residue at corresponding aa position 340 of SEQ ID NOS:172 and 174; an A/G polymorphism at nt position 1046 of SEQ ID NOS:171 and 173, which can result in a glutamine or arginine residue at corresponding aa position 349 of SEQ ID NOS:172 and 174; a G/C polymorphism at nt position 149 of SEQ ID NOS:176 and 182, which can result in an arginine or proline residue at corresponding aa position 50 of SEQ ID NOS:177 and 183; a G/C polymorphism at nt position 176 of SEQ ID NOS:176 and 182, which can result in a glycine or alanine residue at corresponding aa position 59 of SEQ ID NOS:177 and 183; a G/C polymorphism at nt position 179 of SEQ ID NOS:176 and 182, which can result in a serine or threonine residue at corresponding aa position 60 of SEQ ID NOS:177 and 183; a G/T polymorphism at nt position 209 of SEQ ID NOS:176 and 182, which can result in an arginine or leucine residue at corresponding aa position 70 of SEQ ID NOS:177 and 183; an A/G polymorphism at nt position 313 of SEQ ID NOS:189, 191, 193, and 195, which can result in a threonine or alanine residue at corresponding aa position 105 of SEQ ID NOS:190, 192, 194 and 196; an A/T polymorphism at nt position 1670 of SEQ ID NOS:189, 191, 193, and 195, which can result in an aspartate or valine residue at corresponding aa position 557 of SEQ ID NOS:190, 192, 194, and 196; an A/G polymorphism at nt position 1864 of SEQ ID NOS:189, 191, 193, and 195, which can result in an aspartate or asparagine residue at corresponding aa position 622 of SEQ ID NOS:190, 192, 194, and 196; a T/C polymorphism at nt position 1915 of SEQ ID NOS:189, 191, 193, and 195, which can result in a phenylalanine or leucine residue at corresponding aa position 639 of SEQ ID NOS:190, 192, 194, and 196; a G/A polymorphism at nt position 445 of SEQ ID NOS:198 and 200, which can result in a valine or isoleucine residue at corresponding aa position 149 of SEQ ID NOS:199 and 201; a C/T polymorphism at nt position 457 of SEQ ID NOS:198 and 200, which can result in an arginine or tryptophan residue at corresponding aa position 153 of SEQ ID NOS:199 and 201; an A/G polymorphism at nt position 4079 of SEQ ID NO:202, nt position 4454 of SEQ ID NO:204, and nt position 4502 of SEQ ID NO:206, which can result in either a lysine or arginine residue at corresponding aa position 1360 of SEQ ID NO:203, aa position 1485 of SEQ ID NO:205, and aa position 1501 of SEQ ID NO:207; a C/G polymorphism at nt position 2361 of SEQ ID NO:212, which can result in an aspartate or glutamate residue at corresponding aa position 787 of SEQ ID NO:213; a C/A polymorphism at nt position 2467 of SEQ ID NO:212, which can result in a leucine or isoleucine residue at corresponding aa position 823 of SEQ ID NO:213; a translationally silent C/A polymorphism at nt position 2613 of SEQ ID NO:212; a translationally silent C/T polymorphism at nt position 3141 of SEQ ID NO:212; a G/T polymorphism at nt position 3225 of SEQ ID NO:212, which can result in a glutamine or histidine residue at corresponding aa position 1075 of SEQ ID NO:213; a C/T polymorphism at nt position 3226 of SEQ ID NO:212, which can result in an arginine or tryptophan residue at corresponding aa position 1076 of SEQ ID NO:213; and an A/G polymorphism at nt position 4226 of SEQ ID NO:212, which can result in an aspartate or glycine residue at corresponding aa position 1409 of SEQ ID NO:213.

[0053] The described NHPs are apparently encoded on: human chromosome 2, see GenBank Accession No. AC092569 (SEQ ID NOS:171-175); human chromosome 5, see GenBank Accession No. AC008528 SEQ ID NOS:176-188); human chromosome 5, see GenBank Accession No. AC008676 (SEQ ID NOS:189-197); human chromosome 1, see, e.g., GenBank Accession No. AL365208 (SEQ ID NOS:198-201); human chromosome 2, see GenBank Accession No. AC011231 (SEQ ID NOS:202-208); human chromosome 2 (SEQ ID NOS:202-208); human chromosome 1, see GenBank Accession No. AL356356 (SEQ ID NOS:209-211); human chromosome 9, see GenBank Accession No. AL158150 (SEQ ID NOS:212 and 213); human chromosome 2, see, for example, GenBank Accession No. AC012307 (SEQ ID NOS:214-216); and human chromosome 7 and/or 16, see GenBank Accession Nos. AC025284 and AC026498 (SEQ ID NOS:217-222).

[0054] An additional application of the described novel human polynucleotide sequences is their use in the molecular mutagenesis/evolution of proteins that are at least partially encoded by the described novel sequences using, for example, polynucleotide shuffling or related methodologies (see, e.g., U.S. Pat. Nos. 5,830,721 and 5,837,458).

[0055] NHP gene products can also be expressed in transgenic animals. Animals of any non-human species, including, but not limited to, worms, mice, rats, rabbits, guinea pigs, pigs, micro-pigs, birds, goats, and non-human primates, e.g., baboons, monkeys, and chimpanzees, may be used to generate NHP transgenic animals.

[0056] Any technique known in the art may be used to introduce an NHP transgene into animals to produce the founder lines of transgenic animals. Such techniques include, but are not limited to: pronuclear microinjection (U.S. Pat. No. 4,873,191); retrovirus-mediated gene transfer into germ lines (Van der Putten et al., Proc. Natl. Acad. Sci. USA 82:6148-6152, 1985); gene targeting in embryonic stem cells (Thompson et al., Cell 56:313-321, 1989); electroporation of embryos (Lo, Mol. Cell. Biol. 3:1803-1814, 1983); sperm-mediated gene transfer (Lavitrano et al., Cell 57:717-723, 1989); and positive-negative selection, as described in U.S. Pat. No. 5,464,764. For a review of such techniques, see Gordon, Intl. Rev. Cytol. 115:171-229, 1989.

[0057] The present invention provides for non-human transgenic animals that carry an NHP transgene in all their cells, as well as animals that carry an NHP transgene in some, but not all their cells, i.e., mosaic animals or somatic cell transgenic animals. Animals of any species, including, but not limited to, mice, rats, rabbits, guinea pigs, pigs, micro-pigs, goats, and non-human primates, e.g., baboons, monkeys, and chimpanzees, can be used to generate transgenic animals carrying NHP polynucleotides. NHP transgenes may be integrated as a single transgene or in concatamers, e.g., head-to-head tandems or head-to-tail tandems. The transgene may also be selectively introduced into and activated in a particular cell type by following, for example, the teaching of Lasko et al., Proc. Natl. Acad. Sci. USA 89:6232-6236, 1992. The regulatory sequences required for such a cell-type specific activation will depend upon the particular cell type of interest, and will be apparent to those of skill in the art.

[0058] When it is desired that an NHP transgene be integrated into the chromosomal site of the endogenous NHP gene, gene targeting is preferred. Briefly, when such a technique is to be utilized, vectors containing some nucleotide sequences homologous to the endogenous NHP gene are designed for the purpose of integrating, via homologous recombination with chromosomal sequences, into and disrupting the function of the nucleotide sequence of the endogenous NHP gene (i.e., “knockout” animals).

[0059] The transgene can also be selectively introduced into a particular cell-type, thus inactivating the endogenous NHP gene in only that cell-type, by following, for example, the teaching of Gu et al., Science 265:103-106, 1994. The regulatory sequences required for such a cell-type specific inactivation will depend upon the particular cell-type of interest, and will be apparent to those of skill in the art.

[0060] Once transgenic animals have been generated, the expression of the recombinant NHP gene may be assayed utilizing standard techniques. Initial screening may be accomplished by Southern blot analysis or PCR techniques to analyze animal tissues to assay whether integration of the transgene has taken place. The level of mRNA expression of the transgene in the tissues of the transgenic animals may also be assessed using techniques that include, but are not limited to, Northern blot analysis of tissue samples obtained from the animal, in situ hybridization analysis, and RT-PCR. Samples of NHP gene-expressing tissue may also be evaluated immunocytochemically using antibodies specific for the NHP transgene product.

[0061] The present invention also provides for “knock-in” animals. Knock-in animals are those in which a polynucleotide sequence (i.e., a gene or a cDNA) that the animal does not naturally have in its genome is inserted in such a way that it is expressed. Examples include, but are not limited to, a human gene or cDNA used to replace its murine ortholog in the mouse, a murine cDNA used to replace the murine gene in the mouse, and a human gene or cDNA or murine cDNA that is tagged with a reporter construct used to replace the murine ortholog or gene in the mouse. Such replacements can occur at the locus of the murine ortholog or gene, or at another specific site. Such knock-in animals are useful for the in vivo study, testing and validation of, intra alia, human drug targets, as well as for compounds that are directed at the same, and therapeutic proteins.

### 7.2 NHP Amino Acid Sequences

[0062] NHPs, NHP polypeptides, NHP peptide fragments, mutated, truncated, or deleted forms of NHPs, and/or NHP fusion proteins can be prepared for a variety of uses. These uses include, but are not limited to, the generation of antibodies, as therapeutics (for treating abnormal levels of white blood cells, cardiovascular disease, stenosis (or preventing restenosis), inflammatory or proliferative disorders, infectious disease, cancer, etc.), as reagents in diagnostic assays, for the identification of other cellular gene products related to the NHPs, as reagents in assays for screening for compounds that can be used as pharmaceutical reagents useful in the therapeutic treatment of mental, biological, or medical disorders and disease. Given the similarity information and expression data, the described NHPs can be targeted (by drugs, oligos, antibodies, etc.) in order to treat disease, or to augment the efficacy of therapeutic agents.

[0063] The Sequence Listing discloses the amino acid sequences encoded by the described NHP polynucleotides. The NHPs display initiator methionines in DNA sequence contexts consistent with a translation initiation site. Some of the NHPs display signal sequences, which can indicate that such NHPs may be secreted or membrane associated, while other NHPs do not display a consensus signal sequence, which can indicate that such NHP ORFs can be exemplary of the mature or processed forms of the NHPs as typically found in the body. The sequence data presented herein indicate that alternatively spliced forms of the NHPs exist (which may or may not be tissue specific).

[0064] The NHP amino acid sequences of the invention include the amino acid sequences presented in the Sequence Listing, as well as analogues and derivatives thereof. Further, corresponding NHP homologues from other species are encompassed by the invention. In fact, any NHP encoded by the NHP nucleotide sequences described herein are within the scope of the invention, as are any novel polynucleotide sequences encoding all or any novel portion of an amino acid sequence presented in the Sequence Listing. The degenerate nature of the genetic code is well-known, and, accordingly, each amino acid presented in the Sequence Listing is generically representative of the well-known nucleic acid “triplet” codon, or in many cases codons, that can encode the amino acid. As such, as contemplated herein, the amino acid sequences presented in the Sequence Listing, when taken together with the genetic code (see, for example, “Molecular Cell Biology”, Table 4-1 at page 109 (Darnell et al., eds., Scientific American Books, New York, N.Y., 1986)), are generically representative of all the various permutations and combinations of nucleic acid sequences that can encode such amino acid sequences.

[0065] The invention also encompasses proteins that are functionally equivalent to the NHPs encoded by the presently described nucleotide sequences as judged by any of a number of criteria, including, but not limited to, the ability to bind and cleave a substrate of an NHP, or the ability to effect an identical or complementary downstream pathway, or a change in cellular metabolism (e.g., proteolytic activity, ion flux, tyrosine phosphorylation, etc.). Such functionally equivalent NHP proteins include, but are not limited to, additions or substitutions of amino acid residues within the amino acid sequence encoded by the NHP nucleotide sequences described herein, but that result in a silent change, thus producing a functionally equivalent expression product. Amino acid substitutions can be made on the basis of similarity in polarity, charge, solubility, hydrophobicity, hydrophilicity, and/or the amphipathic nature of the residues involved. For example, nonpolar (hydrophobic) amino acids include alanine, leucine, isoleucine, valine, proline, phenylalanine, tryptophan, and methionine; polar neutral amino acids include glycine, serine, threonine, cysteine, tyrosine, asparagine, and glutamine; positively charged (basic) amino acids include arginine, lysine, and histidine; and negatively charged (acidic) amino acids include aspartic acid and glutamic acid.

[0066] A variety of host-expression vector systems can be used to express the NHP nucleotide sequences of the invention. Where, as in the present instance, the NHP peptides or polypeptides are thought to be soluble or secreted molecules, the peptides or polypeptides can be recovered from the culture media. Such expression systems also encompass engineered host cells that express an NHP, or a functional equivalent, in situ. Purification or enrichment of an NHP from such expression systems can be accomplished using appropriate detergents and lipid micelles and methods well-known to those skilled in the art. However, such engineered host cells themselves may be used in situations where it is important not only to retain the structural and functional characteristics of an NHP, but to assess biological activity, e.g., in certain drug screening assays.

[0067] The expression systems that may be used for purposes of the invention include, but are not limited to, microorganisms such as bacteria (e.g., E. coli, B. subtilis) transformed with recombinant bacteriophage DNA, plasmid DNA or cosmid DNA expression vectors containing NHP nucleotide sequences; yeast (e.g., Saccharomyces, Pichia) transformed with recombinant yeast expression vectors containing NHP nucleotide sequences; insect cell systems infected with recombinant virus expression vectors (e.g., baculovirus) containing NHP nucleotide sequences; plant cell systems infected with recombinant virus expression vectors (e.g., cauliflower mosaic virus, CaMV; tobacco mosaic virus, TMV) or transformed with recombinant plasmid expression vectors (e.g., Ti plasmid) containing NHP nucleotide sequences; or mammalian cell systems (e.g., COS, CHO, BHK, 293, 3T3) harboring recombinant expression constructs containing NHP nucleotide sequences and promoters derived from the genome of mammalian cells (e.g., metallothionein promoter) or from mammalian viruses (e.g., the adenovirus late promoter; the vaccinia virus 7.5K promoter).

[0068] In bacterial systems, a number of expression vectors may be advantageously selected depending upon the use intended for the NHP product being expressed. For example, when a large quantity of such a protein is to be produced for the generation of pharmaceutical compositions of or containing an NHP, or for raising antibodies to an NHP, vectors that direct the expression of high levels of fusion protein products that are readily purified may be desirable. Such vectors include, but are not limited to, the E. coli expression vector pUR278 (Ruther and Muller-Hill, EMBO J. 2:1791-1794, 1983), in which an NHP coding sequence may be ligated individually into the vector in-frame with the lacZ coding region so that a fusion protein is produced, pIN vectors (Inouye and Inouye, Nucl. Acids Res. 13:3101-3109, 1985; Van Heeke and Schuster, J. Biol. Chem. 264:5503-5509, 1989), and the like. pGEX vectors (Pharmacia or American Type Culture Collection) can also be used to express foreign polypeptides as fusion proteins with glutathione S-transferase (GST). In general, such fusion proteins are soluble and can easily be purified from lysed cells by adsorption to glutathione-agarose beads followed by elution in the presence of free glutathione. The pGEX vectors are designed to include thrombin or factor Xa protease cleavage sites so that the cloned target expression product can be released from the GST moiety.

[0069] In an exemplary insect system, Autographa californica nuclear polyhedrosis virus (AcNPV) is used as a vector to express foreign polynucleotide sequences. The virus grows in Spodoptera frugiperda cells. An NHP coding sequence can be cloned individually into a non-essential region (for example the polyhedrin gene) of the virus and placed under control of an AcNPV promoter (for example the polyhedrin promoter). Successful insertion of an NHP coding sequence will result in inactivation of the polyhedrin gene and production of non-occluded recombinant virus (i.e., virus lacking the proteinaceous coat coded for by the polyhedrin gene). These recombinant viruses are then used to infect Spodoptera frugiperda cells in which the inserted sequence is expressed (see, e.g., Smith et al., J. Virol. 46:584-593, 1983, and U.S. Pat. No. 4,215,051).

[0070] In mammalian host cells, a number of viral-based expression systems may be utilized. In cases where an adenovirus is used as an expression vector, the NHP nucleotide sequence of interest may be ligated to an adenovirus transcription/translation control complex, e.g., the late promoter and tripartite leader sequence. This chimeric sequence may then be inserted in the adenovirus genome by in vitro or in vivo recombination. Insertion in a non-essential region of the viral genome (e.g., region E1 or E3) will result in a recombinant virus that is viable and capable of expressing an NHP product in infected hosts (see, e.g., Logan and Shenk, Proc. Natl. Acad. Sci. USA 81:3655-3659, 1984). Specific initiation signals may also be required for efficient translation of inserted NHP nucleotide sequences. These signals include the ATG initiation codon and adjacent sequences. In cases where an entire NHP gene or cDNA, including its own initiation codon and adjacent sequences, is inserted into the appropriate expression vector, no additional translational control signals may be needed. However, in cases where only a portion of an NHP coding sequence is inserted, exogenous translational control signals, including, perhaps, the ATG initiation codon, may be provided. Furthermore, the initiation codon should be in phase with the reading frame of the desired coding sequence to ensure translation of the entire insert. These exogenous translational control signals and initiation codons can be of a variety of origins, both natural and synthetic. The efficiency of expression may be enhanced by the inclusion of appropriate transcription enhancer elements, transcription terminators, etc. (see, e.g., Bitter et al., Methods in Enzymol. 153:516-544, 1987).

[0071] In addition, a host cell strain may be chosen that modulates the expression of the inserted sequences, or modifies and processes the expression product in the specific fashion desired. Such modifications (e.g., glycosylation) and processing (e.g., cleavage) of protein products may be important for the function of the protein. Different host cells have characteristic and specific mechanisms for the post-translational processing and modification of proteins and expression products. Appropriate cell lines or host systems can be chosen to ensure the desired modification and processing of the foreign protein expressed. To this end, eukaryotic host cells that possess the cellular machinery for the desired processing of the primary transcript, glycosylation, and phosphorylation of the expression product may be used. Such mammalian host cells include, but are not limited to, CHO, VERO, BHK, HeLa, COS, MDCK, 293, 3T3, WI38, and in particular, human cell lines.

[0072] For long-term, high-yield production of recombinant proteins, stable expression is preferred. For example, cell lines that stably express the NHP sequences described herein can be engineered. Rather than using expression vectors that contain viral origins of replication, host cells can be transformed with DNA controlled by appropriate expression control elements (e.g., promoter, enhancer sequences, transcription terminators, polyadenylation sites, etc.), and a selectable marker. Following the introduction of the foreign DNA, engineered cells may be allowed to grow for 1-2 days in an enriched media, and then switched to a selective media. The selectable marker in the recombinant plasmid confers resistance to the selection and allows cells to stably integrate the plasmid into their chromosomes and grow to form foci, which in turn can be cloned and expanded into cell lines. This method may advantageously be used to engineer cell lines that express an NHP product. Such engineered cell lines may be particularly useful in screening and evaluation of compounds that affect the endogenous activity of an NHP product.

[0073] A number of selection systems may be used, including, but not limited to, the herpes simplex virus thymidine kinase (Wigler et al., Cell 11:223-232, 1977), hypoxanthine-guanine phosphoribosyltransferase (Szybalska and Szybalski, Proc. Natl. Acad. Sci. USA 48:2026-2034, 1962), and adenine phosphoribosyltransferase (Lowy et al., Cell 22:817-823, 1980) genes, which can be employed in tk⁻, hgprt⁻ or aprt⁻ cells, respectively. Also, antimetabolite resistance can be used as the basis of selection for the following genes: dihydrofolate reductase (dhfr), which confers resistance to methotrexate (Wigler et al., Proc. Natl. Acad. Sci. USA 77:3567-3570, 1980, and O'Hare et al., Proc. Natl. Acad. Sci. USA 78:1527-1531, 1981); guanine phosphoribosyl transferase (gpt), which confers resistance to mycophenolic acid (Mulligan and Berg, Proc. Natl. Acad. Sci. USA 78:2072-2076, 1981); neomycin phosphotransferase (neo), which confers resistance to G-418 (Colbere-Garapin et al., J. Mol. Biol. 150:1-14, 1981); and hygromycin B phosphotransferase (hpt), which confers resistance to hygromycin (Santerre et al., Gene 30:147-156, 1984).

[0074] Alternatively, any fusion protein can be readily purified by utilizing an antibody specific for the fusion protein being expressed. Another exemplary system allows for the ready purification of non-denatured fusion proteins expressed in human cell lines (Janknecht et al., Proc. Natl. Acad. Sci. USA 88:8972-8976, 1991). In this system, the sequence of interest is subcloned into a vaccinia recombination plasmid such that the sequence's open reading frame is translationally fused to an amino-terminal tag consisting of six histidine residues. Extracts from cells infected with recombinant vaccinia virus are loaded onto Ni²⁺.nitriloacetic acid-agarose columns, and histidine-tagged proteins are selectively eluted with imidazole-containing buffers.

[0075] Also encompassed by the present invention are fusion proteins that direct an NHP to a target organ and/or facilitate transport across the membrane into the cytosol. Conjugation of NHPs to antibody molecules or their Fab fragments could be used to target cells bearing a particular epitope. Attaching an appropriate signal sequence to an NHP would also transport an NHP to a desired location within the cell. Alternatively targeting of an NHP or its nucleic acid sequence might be achieved using liposome or lipid complex based delivery systems. Such technologies are described in “Liposomes: A Practical Approach” (New, R. R. C., ed., IRL Press, New York, N.Y., 1990), and in U.S. Pat. Nos. 4,594,595, 5,459,127, 5,948,767 and 6,110,490. Additionally embodied are novel protein constructs engineered in such a way that they facilitate transport of NHPs to a target site or desired organ, where they cross the cell membrane and/or the nucleus where the NHPs can exert their functional activity. This goal may be achieved by coupling of an NHP to a cytokine or other ligand that provides targeting specificity, and/or to a protein transducing domain (see generally U.S. Provisional Patent Application Ser. Nos. 60/111,701 and 60/056,713, for examples of such transducing sequences), to facilitate passage across cellular membranes, and can optionally be engineered to include nuclear localization signals.

[0076] Additionally contemplated are oligopeptides that are modeled on an amino acid sequence first described in the Sequence Listing. Such NHP oligopeptides are generally between about 10 to about 100 amino acids long, or between about 16 to about 80 amino acids long, or between about 20 to about 35 amino acids long, or any variation or combination of sizes represented therein that incorporate a contiguous region of sequence first disclosed in the Sequence Listing. Such NHP oligopeptides can be of any length disclosed within the above ranges and can initiate at any amino acid position represented in the Sequence Listing.

[0077] The invention also contemplates “substantially isolated” or “substantially pure” proteins or polypeptides. By a “substantially isolated” or “substantially pure” protein or polypeptide is meant a protein or polypeptide that has been separated from at least some of those components that naturally accompany it. Typically, the protein or polypeptide is substantially isolated or pure when it is at least 60%, by weight, free from the proteins and other naturally-occurring organic molecules with which it is naturally associated in vivo. Preferably, the purity of the preparation is at least 75%, more preferably at least 90%, and most preferably at least 99%, by weight. A substantially isolated or pure protein or polypeptide may be obtained, for example, by extraction from a natural source, by expression of a recombinant nucleic acid encoding the protein or polypeptide, or by chemically synthesizing the protein or polypeptide.

[0078] Purity can be measured by any appropriate method, e.g., column chromatography such as immunoaffinity chromatography using an antibody specific for the protein or polypeptide, polyacrylamide gel electrophoresis, or HPLC analysis. A protein or polypeptide is substantially free of naturally associated components when it is separated from at least some of those contaminants that accompany it in its natural state. Thus, a polypeptide that is chemically synthesized or produced in a cellular system different from the cell from which it naturally originates will be, by definition, substantially free from its naturally associated components. Accordingly, substantially isolated or pure proteins or polypeptides include eukaryotic proteins synthesized in E. coli, other prokaryotes, or any other organism in which they do not naturally occur.

### 7.3 Antibodies to NHP Products

[0079] Antibodies that specifically recognize one or more epitopes of an NHP, epitopes of conserved variants of an NHP, or peptide fragments of an NHP, are also encompassed by the invention. Such antibodies include, but are not limited to, polyclonal antibodies, monoclonal antibodies (mAbs), humanized or chimeric antibodies, single chain antibodies, Fab fragments, F(ab′)₂ fragments, fragments produced by a Fab expression library, anti-idiotypic (anti-Id) antibodies, and epitope-binding fragments of any of the above.

[0080] The antibodies of the invention may be used, for example, in the detection of an NHP in a biological sample and may, therefore, be utilized as part of a diagnostic or prognostic technique whereby patients may be tested for abnormal amounts of an NHP. Such antibodies may also be utilized in conjunction with, for example, compound screening schemes for the evaluation of the effect of test compounds on expression and/or activity of an NHP expression product. Additionally, such antibodies can be used in conjunction with gene therapy to, for example, evaluate normal and/or engineered NHP-expressing cells prior to their introduction into a patient. Such antibodies may additionally be used in methods for the inhibition of abnormal NHP activity. Thus, such antibodies may be utilized as a part of treatment methods.

[0081] For the production of antibodies, various host animals may be immunized by injection with an NHP, an NHP peptide (e.g., one corresponding to a functional domain of an NHP), a truncated NHP polypeptide (an NHP in which one or more domains have been deleted), functional equivalents of an NHP or mutated variants of an NHP. Such host animals may include, but are not limited to, pigs, rabbits, mice, goats, and rats, to name but a few. Various adjuvants may be used to increase the immunological response, depending on the host species, including, but not limited to, Freund's adjuvant (complete and incomplete), mineral salts such as aluminum hydroxide or aluminum phosphate, chitosan, surface active substances such as lysolecithin, pluronic polyols, polyanions, peptides, oil emulsions, and potentially useful human adjuvants such as BCG (bacille Calmette-Guerin) and Corynebacterium parvum. Alternatively, the immune response could be enhanced by combination and/or coupling with molecules such as keyhole limpet hemocyanin, tetanus toxoid, diphtheria toxoid, ovalbumin, cholera toxin, or fragments thereof. Polyclonal antibodies are heterogeneous populations of antibody molecules derived from the sera of the immunized animals.

[0082] Monoclonal antibodies, which are homogeneous populations of antibodies to a particular antigen, can be obtained by any technique that provides for the production of antibody molecules by continuous cell lines in culture. These include, but are not limited to, the hybridoma technique (Kohler and Milstein, Nature 256:495-497, 1975, and U.S. Pat. No. 4,376,110), the human B-cell hybridoma technique (Kosbor et al., Immunology Today 4:72, 1983, and Cole et al., Proc. Natl. Acad. Sci. USA 80:2026-2030, 1983), and the EBV-hybridoma technique (Cole et al., in “Monoclonal Antibodies and Cancer Therapy”, Vol. 27, UCLA Symposia on Molecular and Cellular Biology, New Series, pp. 77-96 (Reisfeld and Sell, eds., Alan R. Liss, Inc. New York, N.Y., 1985)). Such antibodies may be of any immunoglobulin class, including IgG, IgM, IgE, IgA, and IgD, and any subclass thereof. The hybridomas producing the mAbs of this invention may be cultivated in vitro or in vivo. Production of high titers of mabs in vivo makes this the presently preferred method of production.

[0083] In addition, techniques developed for the production of “chimeric antibodies” (Morrison et al., Proc. Natl. Acad. Sci. USA 81:6851-6855, 1984., Neuberger et al., Nature 312:604-608, 1984, and Takeda et al., Nature 314:452-454, 1985) by splicing the genes from a mouse antibody molecule of appropriate antigen specificity together with genes from a human antibody molecule of appropriate biological activity can be used. A chimeric antibody is a molecule in which different portions are derived from different animal species, such as those having a variable region derived from a murine mAb and a human immunoglobulin constant region. Such technologies are described in U.S. Pat. Nos. 6,114,598, 6,075,181 and 5,877,397. Also encompassed by the present invention is the use of fully humanized monoclonal antibodies, as described in U.S. Pat. No. 6,150,584.

[0084] Alternatively, techniques described for the production of single chain antibodies (U.S. Pat. No. 4,946,778, Bird, Science 242:423-426, 1988, Huston et al., Proc. Natl. Acad. Sci. USA 85:5879-5883, 1988, and Ward et al., Nature 341:544-546, 1989) can be adapted to produce single chain antibodies against NHP expression products. Single chain antibodies are formed by linking the heavy and light chain fragments of the Fv region via an amino acid bridge, resulting in a single chain polypeptide.

[0085] Antibody fragments that recognize specific epitopes may be generated by known techniques. For example, such fragments include, but are not limited to: F(ab′)₂ fragments, which can be produced by pepsin digestion of an antibody molecule; and Fab fragments, which can be generated by reducing the disulfide bridges of F(ab′)₂ fragments. Alternatively, Fab expression libraries may be constructed (Huse et al., Science 246:1275-1281, 1989) to allow rapid and easy identification of monoclonal Fab fragments with the desired specificity.

[0086] Antibodies to an NHP can, in turn, be utilized to generate anti-idiotype antibodies that “mimic” a given NHP, using techniques well-known to those skilled in the art (see, e.g., Greenspan and Bona, FASEB J. 7:437-444, 1993, and Nissinoff, J. Immunol. 147:2429-2438, 1991). For example, antibodies that bind to an NHP domain and competitively inhibit the binding of an NHP to its cognate receptor can be used to generate anti-idiotypes that “mimic” the NHP and, therefore, bind and activate or neutralize a receptor. Such anti-idiotypic antibodies, or Fab fragments of such anti-idiotypes, can be used in therapeutic regimens involving an NHP signaling pathway.

[0087] Additionally given the high degree of relatedness of mammalian NHPs, NHP knock-out mice (having never seen an NHP, and thus never been tolerized to an NHP) have an unique utility, as they can be advantageously applied to the generation of antibodies against the disclosed mammalian NHPs (i.e., the NHPs will be immunogenic in NHP knock-out animals).

[0088] The present invention is not to be limited in scope by the specific embodiments described herein, which are intended as single illustrations of individual aspects of the invention, and functionally equivalent methods and components are within the scope of the invention. Indeed, various modifications of the invention, in addition to those shown and described herein, will become apparent to those skilled in the art from the foregoing description. Such modifications are intended to fall within the scope of the appended claims. All cited publications, patents, and patent applications are herein incorporated by reference in their entirety.

1. An isolated nucleic acid molecule that encodes the amino acid sequence of SEQ ID NO:2, 4, 6, 8, 11, 13, 15, 17, 19, 21, 24, 26, 28, 30, 32, 34, 36, 39, 41, 43, 45, 47, 49, 51, 53, 55, 57, 59, 61, 64, 66, 68, 71, 73, 75, 78, 80, 82, 84, 86, 88, 90, 92, 94, 96, 98, 100, 102, 105, 107, 109, 111, 113, 115, 117, 119, 122, 125, 128, 130, 132, 134, 136, 139, 141, 143, 145, 147, 149, 151, 153, 155, 157, 159, 162, 165, 167, 169, 172, 174, 177, 179, 181, 183, 185, 187, 190, 192, 194, 196, 199, 201, 203, 205, 207, 210, 213, 215, 218, or 221.

2. The isolated nucleic acid molecule of claim 1, wherein said nucleic acid molecule comprises the nucleotide sequence of SEQ ID NO: 1, 3, 5, 7, 10, 12, 14, 16, 18, 20, 23, 25, 27, 29, 31, 33, 35, 38, 40, 42, 44, 46, 48, 50, 52, 54, 56, 58, 60, 63, 65, 67, 70, 72,74, 77, 79, 81, 83, 85, 87, 89, 91, 93, 95, 97, 99, 101, 104, 106, 108, 110, 112, 114, 116, 118, 121, 124, 127, 129, 131, 133, 135, 138, 140, 142, 144, 146, 148, 150, 152, 154, 156, 158, 161, 164, 166, 168, 171, 173, 176, 178, 180, 182, 184, 186, 189, 191, 193, 195, 198, 200, 202, 204, 206, 209, 212, 214, 217, or 220.

3. An expression vector comprising the isolated nucleic acid molecule of claim 1.

4. (canceled)

5. An isolated polypeptide comprising the amino acid sequence of SEQ ID NO:2, 4, 6, 8, 11, 13, 15, 17, 19, 21, 24, 26, 28, 30, 32, 34, 36, 39, 41, 43, 45, 47, 49, 51, 53, 55, 57, 59, 61, 64, 66, 68, 71, 73, 75, 78, 80, 82, 84, 86, 88, 90, 92, 94, 96, 98, 100, 102, 105, 107, 109, 111, 113, 115, 117, 119, 122, 125, 128, 130, 132, 134, 136, 139, 141, 143, 145, 147, 149, 151, 153, 155, 157, 159, 162, 165, 167, 169, 172, 174, 177, 179, 181, 183, 185, 187, 190, 192, 194, 196, 199, 201, 203, 205, 207, 210, 213, 215, 218, or 221.

6. An antibody that selectively binds a polypeptide drawn from the group consisting of: SEQ ID NO:2, 4, 6, 8, 11, 13, 15, 17, 19, 21, 24, 26, 28, 30, 32, 34, 36, 39, 41, 43, 45, 47, 49, 51, 53, 55, 57, 59, 61, 64, 66, 68, 71, 73, 75, 78, 80, 82, 84, 86, 88, 90, 92, 94, 96, 98, 100, 102, 105, 107, 109, 111, 113, 115, 117, 119, 122, 125, 128, 130, 132, 134, 136, 139, 141, 143, 145, 147, 149, 151, 153, 155, 157, 159, 162, 165, 167, 169, 172, 174, 177, 179, 181, 183, 185, 187, 190, 192, 194, 196, 199, 201, 203, 205, 207, 210, 213, 215, 218, and 221.

7. An oligonucleotide that inhibits the expression of a nucleic acid molecule that encodes an amino acid sequence drawn from the group consisting of SEQ ID NO:2, 4, 6, 8, 11, 13, 15, 17, 19, 21, 24, 26, 28, 30, 32, 34, 36, 39, 41, 43, 45, 47, 49, 51, 53, 55, 57, 59, 61, 64, 66, 68, 71, 73, 75, 78, 80, 82, 84, 86, 88, 90, 92, 94, 96, 98, 100, 102, 105, 107, 109, 111, 113, 115, 117, 119, 122, 125, 128, 130, 132, 134, 136, 139, 141, 143, 145, 147, 149, 151, 153, 155, 157, 159, 162, 165, 167, 169, 172, 174, 177, 179, 181, 183, 185, 187, 190, 192, 194, 196, 199, 201, 203, 205, 207, 210, 213, 215, 218, and 221.

The application's sequence listing, which the Patent Office published only in electronic form, follows.

SEQUENCE LISTING (222 sequences)

SEQ ID NO: 1 - DNA, 2220 bp, Homo sapiens
  CDS (1)...(2220)
atgctgtactccccagggccgagtcttccggagtcagcagagagcctggatggatcacaggaggataagcctcggggctcatgtgcggagcccacttttactgatacgggaatggtggctcacataaacaacagccggctcaaggccaagggcgtgggccagcacgacaacgcccagaactttggtaaccagagctttgaggagctgcgagcagcctgtctaagaaagggggagctcttcgaggaccccttattccctgctgaacccagctcactgggcttcaaggacctgggccccaactccaaaaatgtgcagaacatctcctggcagcggcccaaggatatcataaacaaccctctattcatcatggatgggatttctccaacagacatctgccaggggatcctcggggactgctggctgctggctgccatcggctcccttaccacctgccccaaactgctataccgcgtggtgcccagaggacagagcttcaagaaaaactatgctggcatcttccattttcagatttggcagtttggacagtgggtgaacgtggtggtagatgaccggctgcccacaaagaatgacaagctggtgtttgtgcactcaaccgaacgcagtgagttctggagtgccctgctggagaaggcgtatgccaagctgagtgggtcctatgaagcattgtcagggggcagtaccatggagggccttgaggacttcacaggaggcgtggcccagagcttccaactccagaggccccctcagaacctgctcaggctccttaggaaggccgtggagcgatcctccctcatgggttgctccattgaagtcaccagtgatagtgaactggaatccatgactgacaagatgctggtgagagggcacgcttactctgtgactggccttcaggatgtccactacagaggcaaaatggaaacactgattcgggtccggaatccctggggccggattgagtggaatggagcttggagtgacagtgccagggagtgggaagaggtggcctcagacatccagatgcagctgctgcacaagacggaggacggggagttctggatgtcctaccaagatttcctgaacaacttcacgctcctggagatctgcaacctcacgcctgatacactctctggggactacaagagctactggcacaccaccttctacgagggcagctggcgcagaggcagctccgcagggggctgcaggaaccaccctggcacgttctggaccaacccccagtttaagatctctcttcctgagggggatgacccagaggatgacgcagagggcaatgttgtggtctgcacctgcctggtggccctaatgcagaagaactggcggcatgcacggcagcagggagcccagctgcagaccattggctttgtcctctacgcggtcccaaaagagtttcagaacattcaggatgtccacttgaagaaggaattcttcacgaagtatcaggaccacggcttctcagagatcttcaccaactcacgggaggtgagcagccaactccggctgcctccgggggaatatatcattattccctccacctttgagccacacagagatgctgacttcctgcttcgggtcttcaccgagaagcacagcgagtcatgggaattggatgaagtcaactatgctgagcaactccaagaggaaaaggtctctgaggatgacatggaccaggacttcctacatttgtttaagatagtggcaggagagggcaaggagataggggtgtatgagctccagaggctgctcaacaggatggccatcaaattcaaaagcttcaagaccaagggctttggcctggatgcttgccgctgcatgatcaacctcatggataaagatggctctggcaagctggggcttctagagttcaagatcctgtggaaaaaactcaagaaatggatggacatcttcagagagtgtgaccaggaccattcaggcaccttgaactcctatgagatgcgcctggttattgagaaagcaggcatcaagctgaacaacaaggtaatgcaggtcctggtggccaggtatgcagatgatgacctgatcatagactttgacagcttcatcagctgtttcctgaggctaaagaccatgttcacattctttctaaccatggaccccaagaatactggccatatttgcttgagcctggaacagtggctgcagatgaccatgtggggatag

SEQ ID NO: 2 - protein, 739 aa, Homo sapiens [sequence omitted]

SEQ ID NO: 3 - DNA, 2172 bp, Homo sapiens
  CDS (1)...(2172)
atgctgtactccccagggccgagtcttccggagtcagcagagagcctggatggatcacaggaggataagcctcggggctcatgtgcggagcccacttttactgatacgggaatggtggctcacataaacaacagccggctcaaggccaagggcgtgggccagcacgacaacgcccagaactttggtaaccagagctttgaggagctgcgagcagcctgtctaagaaagggggagctcttcgaggaccccttattccctgctgaacccagctcactgggcttcaaggacctgggccccaactccaaaaatgtgcagaacatctcctggcagcggcccaaggatatcataaacaaccctctattcatcatggatgggatttctccaacagacatctgccaggggatcctcggggactgctggctgctggctgccatcggctcccttaccacctgccccaaactgctataccgcgtggtgcccagaggacagagcttcaagaaaaactatgctggcatcttccattttcagatttggcagtttggacagtgggtgaacgtggtggtagatgaccggctgcccacaaagaatgacaagctggtgtttgtgcactcaaccgaacgcagtgagttctggagtgccctgctggagaaggcgtatgccaagctgagtgggtcctatgaagcattgtcagggggcagtaccatggagggccttgaggacttcacaggaggcgtggcccagagcttccaactccagaggccccctcagaacctgctcaggctccttaggaaggccgtggagcgatcctccctcatgggttgctccattgaagtcaccagtgatagtgaactggaatccatgactgacaagatgctggtgagagggcacgcttactctgtgactggccttcaggatgtccactacagaggcaaaatggaaacactgattcgggtccggaatccctggggccggattgagtggaatggagcttggagtgacagtgccagggagtgggaagaggtggcctcagacatccagatgcagctgctgcacaagacggaggacggggagttctggatgtcctaccaagatttcctgaacaacttcacgctcctggagatctgcaacctcacgcctgatacactctctggggactacaagagctactggcacaccaccttctacgagggcagctggcgcagaggcagctccgcagggggctgcaggaaccaccctggcacgttctggaccaacccccagtttaagatctctcttcctgagggggatgacccagaggatgacgcagagggcaatgttgtggtctgcacctgcctggtggccctaatgcagaagaactggcggcatgcacggcagcagggagcccagctgcagaccattggctttgtcctctacgcggtcccaaaagagtttcagaacattcaggatgtccacttgaagaaggaattcttcacgaagtatcaggaccacggcttctcagagatcttcaccaactcacgggaggtgagcagccaactccggctgcctccgggggaatatatcattattccctccacctttgagccacacagagatgctgacttcctgcttcgggtcttcaccgagaagcacagcgagtcatgggaattggatgaagtcaactatgctgagcaactccaagaggaaaaggtctctgaggatgacatggaccaggacttcctacatttgtttaagatagtggcaggagagggcaaggagataggggtgtatgagctccagaggctgctcaacaggatggccatcaaattcaaaagcttcaagaccaagggctttggcctggatgcttgccgctgcatgatcaacctcatggataaagatggctctggcaagctggggcttctagagttcaagatcctgtggaaaaaactcaagaaatggatggacatcttcagagagtgtgaccaggaccattcaggcaccttgaactcctatgagatgcgcctggttattgagaaagcaggcatcaagctgaacaacaaggtaatgcaggtcctggtggccaggtatgcagatgatgacctgatcatagactttgacagcttcatcagctgtttcctgaggctaaagaccatgttcatggctgcagatgaccatgtggggatagaggcgctgtag

SEQ ID NO: 4 - protein, 723 aa, Homo sapiens
MLYSPGPSLPESAESLDGSQEDKPRGSCAEPTFTDTGMVAHINNSRLKAKGVGQHDNAQNFGNQSFEELRAACLRKGELFEDPLFPAEPSSLGFKDLGPNSKNVQNISWQRPKDIINNPLFIMDGISPTDICQGILGDCWLLAAIGSLTTCPKLLYRVVPRGQSFKKNYAGIFHFQIWQFGQWVNVVVDDRLPTKNDKLVFVHSTERSEFWSALLEKAYAKLSGSYEALSGGSTMEGLEDFTGGVAQSFQLQRPPQNLLRLLRKAVERSSLMGCSIEVTSDSELESMTDKMLVRGHAYSVTGLQDVHYRGKMETLIRVRNPWGRIEWNGAWSDSAREWEEVASDIQMQLLHKTEDGEFWMSYQDFLNNFTLLEICNLTPDTLSGDYKSYWHTTFYEGSWRRGSSAGGCRNHPGTFWTNPQFKISLPEGDDPEDDAEGNVVVCTCLVALMQKNWRHARQQGAQLQTIGFVLYAVPKEFQNIQDVHLKKEFFTKYQDHGFSEIFTNSREVSSQLRLPPGEYIIIPSTFEPHRDADFLLRVFTEKHSESWELDEVNYAEQLQEEKVSEDDMDQDFLHLFKIVAGEGKEIGVYELQRLLNRMAIKFKSFKTKGFGLDACRCMINLMDKDGSGKLGLLEFKILWKKLKKWMDIFRECDQDHSGTLNSYEMRLVIEKAGIKLNNKVMQVLVARYADDDLIIDFDSFISCFLRLKTMFMAADDHVGIEAL

SEQ ID NO: 5 - DNA, 2109 bp, Homo sapiens
  CDS (1)...(2109)
atggtggctcacataaacaacagccggctcaaggccaagggcgtgggccagcacgacaacgcccagaactttggtaaccagagctttgaggagctgcgagcagcctgtctaagaaagggggagctcttcgaggaccccttattccctgctgaacccagctcactgggcttcaaggacctgggccccaactccaaaaatgtgcagaacatctcctggcagcggcccaaggatatcataaacaaccctctattcatcatggatgggatttctccaacagacatctgccaggggatcctcggggactgctggctgctggctgccatcggctcccttaccacctgccccaaactgctataccgcgtggtgcccagaggacagagcttcaagaaaaactatgctggcatcttccattttcagatttggcagtttggacagtgggtgaacgtggtggtagatgaccggctgcccacaaagaatgacaagctggtgtttgtgcactcaaccgaacgcagtgagttctggagtgccctgctggagaaggcgtatgccaagctgagtgggtcctatgaagcattgtcagggggcagtaccatggagggccttgaggacttcacaggaggcgtggcccagagcttccaactccagaggccccctcagaacctgctcaggctccttaggaaggccgtggagcgatcctccctcatgggttgctccattgaagtcaccagtgatagtgaactggaatccatgactgacaagatgctggtgagagggcacgcttactctgtgactggccttcaggatgtccactacagaggcaaaatggaaacactgattcgggtccggaatccctggggccggattgagtggaatggagcttggagtgacagtgccagggagtgggaagaggtggcctcagacatccagatgcagctgctgcacaagacggaggacggggagttctggatgtcctaccaagatttcctgaacaacttcacgctcctggagatctgcaacctcacgcctgatacactctctggggactacaagagctactggcacaccaccttctacgagggcagctggcgcagaggcagctccgcagggggctgcaggaaccaccctggcacgttctggaccaacccccagtttaagatctctcttcctgagggggatgacccagaggatgacgcagagggcaatgttgtggtctgcacctgcctggtggccctaatgcagaagaactggcggcatgcacggcagcagggagcccagctgcagaccattggctttgtcctctacgcggtcccaaaagagtttcagaacattcaggatgtccacttgaagaaggaattcttcacgaagtatcaggaccacggcttctcagagatcttcaccaactcacgggaggtgagcagccaactccggctgcctccgggggaatatatcattattccctccacctttgagccacacagagatgctgacttcctgcttcgggtcttcaccgagaagcacagcgagtcatgggaattggatgaagtcaactatgctgagcaactccaagaggaaaaggtctctgaggatgacatggaccaggacttcctacatttgtttaagatagtggcaggagagggcaaggagataggggtgtatgagctccagaggctgctcaacaggatggccatcaaattcaaaagcttcaagaccaagggctttggcctggatgcttgccgctgcatgatcaacctcatggataaagatggctctggcaagctggggcttctagagttcaagatcctgtggaaaaaactcaagaaatggatggacatcttcagagagtgtgaccaggaccattcaggcaccttgaactcctatgagatgcgcctggttattgagaaagcaggcatcaagctgaacaacaaggtaatgcaggtcctggtggccaggtatgcagatgatgacctgatcatagactttgacagcttcatcagctgtttcctgaggctaaagaccatgttcacattctttctaaccatggaccccaagaatactggccatatttgcttgagcctggaacagtggctgcagatgaccatgtggggatag

SEQ ID NO: 6 - protein, 702 aa, Homo sapiens
MVAHINNSRLKAKGVGQHDNAQNFGNQSFEELRAACLRKGELFEDPLFPAEPSSLGFKDLGPNSKNVQNISWQRPKDIINNPLFIMDGISPTDICQGILGDCWLLAAIGSLTTCPKLLYRVVPRGQSFKKNYAGIFHFQIWQFGQWVNVVVDDRLPTKNDKLVFVHSTERSEFWSALLEKAYAKLSGSYEALSGGSTMEGLEDFTGGVAQSFQLQRPPQNLLRLLRKAVERSSLMGCSIEVTSDSELESMTDKMLVRGHAYSVTGLQDVHYRGKMETLIRVRNPWGRIEWNGAWSDSAREWEEVASDIQMQLLHKTEDGEFWMSYQDFLNNFTLLEICNLTPDTLSGDYKSYWHTTFYEGSWRRGSSAGGCRNHPGTFWTNPQFKISLPEGDDPEDDAEGNVVVCTCLVALMQKNWRHARQQGAQLQTIGFVLYAVPKEFQNIQDVHLKKEFFTKYQDHGFSEIFTNSREVSSQLRLPPGEYIIIPSTFEPHRDADFLLRVFTEKHSESWELDEVNYAEQLQEEKVSEDDMDQDFLHLFKIVAGEGKEIGVYELQRLLNRMAIKFKSFKTKGFGLDACRCMINLMDKDGSGKLGLLEFKILWKKLKKWMDIFRECDQDHSGTLNSYEMRLVIEKAGIKLNNKVMQVLVARYADDDLIIDFDSFISCFLRLKTMFTFFLTMDPKNTGHICLSLEQWLQMTMWG

SEQ ID NO: 7 - DNA, 2061 bp, Homo sapiens
  CDS (1)...(2061)
atggtggctcacataaacaacagccggctcaaggccaagggcgtgggccagcacgacaacgcccagaactttggtaaccagagctttgaggagctgcgagcagcctgtctaagaaagggggagctcttcgaggaccccttattccctgctgaacccagctcactgggcttcaaggacctgggccccaactccaaaaatgtgcagaacatctcctggcagcggcccaaggatatcataaacaaccctctattcatcatggatgggatttctccaacagacatctgccaggggatcctcggggactgctggctgctggctgccatcggctcccttaccacctgccccaaactgctataccgcgtggtgcccagaggacagagcttcaagaaaaactatgctggcatcttccattttcagatttggcagtttggacagtgggtgaacgtggtggtagatgaccggctgcccacaaagaatgacaagctggtgtttgtgcactcaaccgaacgcagtgagttctggagtgccctgctggagaaggcgtatgccaagctgagtgggtcctatgaagcattgtcagggggcagtaccatggagggccttgaggacttcacaggaggcgtggcccagagcttccaactccagaggccccctcagaacctgctcaggctccttaggaaggccgtggagcgatcctccctcatgggttgctccattgaagtcaccagtgatagtgaactggaatccatgactgacaagatgctggtgagagggcacgcttactctgtgactggccttcaggatgtccactacagaggcaaaatggaaacactgattcgggtccggaatccctggggccggattgagtggaatggagcttggagtgacagtgccagggagtgggaagaggtggcctcagacatccagatgcagctgctgcacaagacggaggacggggagttctggatgtcctaccaagatttcctgaacaacttcacgctcctggagatctgcaacctcacgcctgatacactctctggggactacaagagctactggcacaccaccttctacgagggcagctggcgcagaggcagctccgcagggggctgcaggaaccaccctggcacgttctggaccaacccccagtttaagatctctcttcctgagggggatgacccagaggatgacgcagagggcaatgttgtggtctgcacctgcctggtggccctaatgcagaagaactggcggcatgcacggcagcagggagcccagctgcagaccattggctttgtcctctacgcggtcccaaaagagtttcagaacattcaggatgtccacttgaagaaggaattcttcacgaagtatcaggaccacggcttctcagagatcttcaccaactcacgggaggtgagcagccaactccggctgcctccgggggaatatatcattattccctccacctttgagccacacagagatgctgacttcctgcttcgggtcttcaccgagaagcacagcgagtcatgggaattggatgaagtcaactatgctgagcaactccaagaggaaaaggtctctgaggatgacatggaccaggacttcctacatttgtttaagatagtggcaggagagggcaaggagataggggtgtatgagctccagaggctgctcaacaggatggccatcaaattcaaaagcttcaagaccaagggctttggcctggatgcttgccgctgcatgatcaacctcatggataaagatggctctggcaagctggggcttctagagttcaagatcctgtggaaaaaactcaagaaatggatggacatcttcagagagtgtgaccaggaccattcaggcaccttgaactcctatgagatgcgcctggttattgagaaagcaggcatcaagctgaacaacaaggtaatgcaggtcctggtggccaggtatgcagatgatgacctgatcatagactttgacagcttcatcagctgtttcctgaggctaaagaccatgttcatggctgcagatgaccatgtggggatagaggcgctgtag

SEQ ID NO: 8 - protein, 686 aa, Homo sapiens
MVAHINNSRLKAKGVGQHDNAQNFGNQSFEELRAACLRKGELFEDPLFPAEPSSLGFKDLGPNSKNVQNISWQRPKDIINNPLFIMDGISPTDICQGILGDCWLLAAIGSLTTCPKLLYRVVPRGQSFKKNYAGIFHFQIWQFGQWVNVVVDDRLPTKNDKLVFVHSTERSEFWSALLEKAYAKLSGSYEALSGGSTMEGLEDFTGGVAQSFQLQRPPQNLLRLLRKAVERSSLMGCSIEVTSDSELESMTDKMLVRGHAYSVTGLQDVHYRGKMETLIRVRNPWGRIEWNGAWSDSAREWEEVASDIQMQLLHKTEDGEFWMSYQDFLNNFTLLEICNLTPDTLSGDYKSYWHTTFYEGSWRRGSSAGGCRNHPGTFWTNPQFKISLPEGDDPEDDAEGNVVVCTCLVALMQKNWRHARQQGAQLQTIGFVLYAVPKEFQNIQDVHLKKEFFTKYQDHGFSEIFTNSREVSSQLRLPPGEYIIIPSTFEPHRDADFLLRVFTEKHSESWELDEVNYAEQLQEEKVSEDDMDQDFLHLFKIVAGEGKEIGVYELQRLLNRMAIKFKSFKTKGFGLDACRCMINLMDKDGSGKLGLLEFKILWKKLKKWMDIFRECDQDHSGTLNSYEMRLVIEKAGIKLNNKVMQVLVARYADDDLIIDFDSFISCFLRLKTMFMAADDHVGIEAL

SEQ ID NO: 9 - DNA, 2806 bp, Homo sapiens
caagcaccgagctagccaccagcatgctgtactccccagggccgagtcttccggagtcagcagagagcctggatggatcacaggaggataagcctcggggctcatgtgcggagcccacttttactgatacgggaatggtggctcacataaacaacagccggctcaaggccaagggcgtgggccagcacgacaacgcccagaactttggtaaccagagctttgaggagctgcgagcagcctgtctaagaaagggggagctcttcgaggaccccttattccctgctgaacccagctcactgggcttcaaggacctgggccccaactccaaaaatgtgcagaacatctcctggcagcggcccaaggatatcataaacaaccctctattcatcatggatgggatttctccaacagacatctgccaggggatcctcggggactgctggctgctggctgccatcggctcccttaccacctgccccaaactgctataccgcgtggtgcccagaggacagagcttcaagaaaaactatgctggcatcttccattttcagatttggcagtttggacagtgggtgaacgtggtggtagatgaccggctgcccacaaagaatgacaagctggtgtttgtgcactcaaccgaacgcagtgagttctggagtgccctgctggagaaggcgtatgccaagctgagtgggtcctatgaagcattgtcagggggcagtaccatggagggccttgaggacttcacaggaggcgtggcccagagcttccaactccagaggccccctcagaacctgctcaggctccttaggaaggccgtggagcgatcctccctcatgggttgctccattgaagtcaccagtgatagtgaactggaatccatgactgacaagatgctggtgagagggcacgcttactctgtgactggccttcaggatgtccactacagaggcaaaatggaaacactgattcgggtccggaatccctggggccggattgagtggaatggagcttggagtgacagtgccagggagtgggaagaggtggcctcagacatccagatgcagctgctgcacaagacggaggacggggagttctggatgtcctaccaagatttcctgaacaacttcacgctcctggagatctgcaacctcacgcctgatacactctctggggactacaagagctactggcacaccaccttctacgagggcagctggcgcagaggcagctccgcagggggctgcaggaaccaccctggcacgttctggaccaacccccagtttaagatctctcttcctgagggggatgacccagaggatgacgcagagggcaatgttgtggtctgcacctgcctggtggccctaatgcagaagaactggcggcatgcacggcagcagggagcccagctgcagaccattggctttgtcctctacgcggtcccaaaagagtttcagaacattcaggatgtccacttgaagaaggaattcttcacgaagtatcaggaccacggcttctcagagatcttcaccaactcacgggaggtgagcagccaactccggctgcctccgggggaatatatcattattccctccacctttgagccacacagagatgctgacttcctgcttcgggtcttcaccgagaagcacagcgagtcatgggaattggatgaagtcaactatgctgagcaactccaagaggaaaaggtctctgaggatgacatggaccaggacttcctacatttgtttaagatagtggcaggagagggcaaggagataggggtgtatgagctccagaggctgctcaacaggatggccatcaaattcaaaagcttcaagaccaagggctttggcctggatgcttgccgctgcatgatcaacctcatggataaagatggctctggcaagctggggcttctagagttcaagatcctgtggaaaaaactcaagaaatggatggacatcttcagagagtgtgaccaggaccattcaggcaccttgaactcctatgagatgcgcctggttattgagaaagcaggcatcaagctgaacaacaaggtaatgcaggtcctggtggccaggtatgcagatgatgacctgatcatagactttgacagcttcatcagctgtttcctgaggctaaagaccatgttcacattctttctaaccatggaccccaagaatactggccatatttgcttgagcctggaacagtggctgcagatgaccatgtggggatagaggcgctgtaggagcctggtcatctctaccagcagcagcagcagcgaggttctagcccaggagggtggggtgcttcttgtagccctcagctctccggtctctgctgatgaaatgggctccaggtggcagtgcccgggtcccaggtgccgtgtttactgcagcagtgggacctccgtgcccactcccccagctcagaggctttctcttttttccccaacccggcttctgatggctggctttcccccaccatcgctctctcagagtatattttactaaagagtagttgatgcttccccagggtccccctggctggggaggccaagaatagggaagggacttgtagcccgtttcttaccctccatgcttgctgtcctgctcacacctacctgctgaccacccatcctggcacagcctctgttttcctccccatctgtggatactattctaataaatagcacatgccattggcaaaaaaaaaaaaaaaaaaaaaaaaaaaaaaaaaaaaaaaaaaaaaaaaaaaaaaaaaaaaaaaaaaaaaaaaaaaaaaaaaaaaaaaaaaaaaa

SEQ ID NO: 10 - DNA, 141 bp, Homo sapiens
  CDS (1)...(141)
atgaagtgtctcgggaagcgcaggggccaggcagctgctttcctgcctctttgctggctctttttgaagattctgcaaccggggcacagccacctttataacaaccgctatgctggtccacagggaaagaaacttttgaaa

SEQ ID NO: 11 - protein, 47 aa, Homo sapiens
MKCLGKRRGQAAAFLPLCWLFLKILQPGHSHLYNNRYAGPQGKKLLK

SEQ ID NO: 12 - DNA, 264 bp, Homo sapiens
  CDS (1)...(264)
atgaagtgtctcgggaagcgcaggggccaggcagctgctttcctgcctctttgctggctctttttgaagattctgcaaccggggcacagccacctttataacaaccgctatgctggtgataaagtgataagatttattcccaaaacagaagaggaagcatatgcactgaagaaaatatcctatcaacttaaggttggttcctgcactacaggtggacctgtggcagcccagcagtatctcctatgtatcagagggaacagttac

SEQ ID NO: 13 - protein, 88 aa, Homo sapiens
MKCLGKRRGQAAAFLPLCWLFLKILQPGHSHLYNNRYAGDKVIRFIPKTEEEAYALKKISYQLKVGSCTTGGPVAAQQYLLCIRGNSY

SEQ ID NO: 14 - DNA, 741 bp, Homo sapiens
  CDS (1)...(741)
atgaagtgtctcgggaagcgcaggggccaggcagctgctttcctgcctctttgctggctctttttgaagattctgcaaccggggcacagccacctttataacaaccgctatgctggtgataaagtgataagatttattcccaaaacagaagaggaagcatatgcactgaagaaaatatcctatcaacttaaggtggacctgtggcagcccagcagtatctcctatgtatcagagggaacagttactgatgtccatatcccccaaaatggttcccgagccctgttagccttcttacaggaagccaacatccagtacaaggtcctcatagaagatcttcagaaaacactggagaagggaagcagcttgcacacccagagaaaccgaagatccctctctggatataattatgaagtttatcactccttagaagaaattcaaaattggatgcatcatctgaataaaactcactcaggcctcattcacatgttctctattggaagatcatatgagggaagatctctttttattttaaagctgggcagacgatcacgactcaaaagagctgtttggatagactgtggtattcatgcaagagaatggattggtcctgccttttgtcagtggtttgtaaaagaagtcctagaaaacacagctcacaaatgtcaagaatgtactaaatttacaaaatatctctgccactaccaaaaccacaaaagtatgcttaatcttgtaagtattgag

SEQ ID NO: 15 - protein, 247 aa, Homo sapiens
MKCLGKRRGQAAAFLPLCWLFLKILQPGHSHLYNNRYAGDKVIRFIPKTEEEAYALKKISYQLKVDLWQPSSISYVSEGTVTDVHIPQNGSRALLAFLQEANIQYKVLIEDLQKTLEKGSSLHTQRNRRSLSGYNYEVYHSLEEIQNWMHHLNKTHSGLIHMFSIGRSYEGRSLFILKLGRRSRLKRAVWIDCGIHAREWIGPAFCQWFVKEVLENTAHKCQECTKFTKYLCHYQNHKSMLNLVSIE

SEQ ID NO: 16 - DNA, 276 bp, Homo sapiens
  CDS (1)...(276)
atgaagtgtctcgggaagcgcaggggccaggcagctgctttcctgcctctttgctggctctttttgaagattctgcaaccggggcacagccacctttataacaaccgctatgctggtgataaagtgataagatttattcccaaaacagaagaggaagcatatgcactgaagaaaatatcctatcaacttaagggtcctcatagaagatcttcagaaaacactggagaagggaagcagcttgcacacccagagaaaccgaagatccctctctggata

SEQ ID NO: 17 - protein, 92 aa, Homo sapiens
MKCLGKRRGQAAAFLPLCWLFLKILQPGHSHLYNNRYAGDKVIRFIPKTEEEAYALKKISYQLKGPHRRSSENTGEGKQLAHPEKPKIPLWI

SEQ ID NO: 18 - DNA, 1311 bp, Homo sapiens
  CDS (1)...(1311)
atgaagtgtctcgggaagcgcaggggccaggcagctgctttcctgcctctttgctggctctttttgaagattctgcaaccggggcacagccacctttataacaaccgctatgctggtgataaagtgataagatttattcccaaaacagaagaggaagcatatgcactgaagaaaatatcctatcaacttaaggtggacctgtggcagcccagcagtatctcctatgtatcagagggaacagttactgatgtccatatcccccaaaatggttcccgagccctgttagccttcttacaggaagccaacatccagtacaaggtcctcatagaagatcttcagaaaacactggagaagggaagcagcttgcacacccagagaaaccgaagatccctctctggatataattatgaagtttatcactccttagaagaaattcaaaattggatgcatcatctgaataaaactcactcaggcctcattcacatgttctctattggaagatcatatgagggaagatctctttttattttaaagctgggcagacgatcacgactcaaaagagctgtttggatagactgtggtattcatgcaagagaatggattggtcctgccttttgtcagtggtttgtaaaagaagctcttctaacatataagagtgacccagccatgagaaaaatgttgaatcatctatatttctatatcatgcctgtgtttaacgtcgatggataccattttagttggaccaatgatcgattttggagaaaaacaaggtcaaggaactcaaggtttcgctgccgtggagtggatgccaatagaaactggaaagtgaagtggtgtgatgaaggagcttctatgcacccttgtgatgacacatactgtggcccttttccagaatctgagccggaagtgaaggctgtagctaacttccttcgaaaacacagaaagcacattagggcttatctctcctttcatgcatatgctcagatgttactgtatccctattcttacaaatatgcaacaattcccaattttagatgtgtggaatctgcagcttataaagctgtgaatgcacttcagtcagtatacggggtacgatacagatatggaccagcctccacaacgttgtatgtgagctctggtagctcaatggattgggcctacaaaaatggaataccttatgcatttgctttcgaactacgtgacactggatattttggatttttactcccagagatgctcatcaaacccacctgtacagaaactatgctggctgtgaaaaatatcacaatgcacctgctaaagaaatgtccc

SEQ ID NO: 19 - protein, 437 aa, Homo sapiens
MKCLGKRRGQAAAFLPLCWLFLKILQPGHSHLYNNRYAGDKVIRFIPKTEEEAYALKKISYQLKVDLWQPSSISYVSEGTVTDVHIPQNGSRALLAFLQEANIQYKVLIEDLQKTLEKGSSLHTQRNRRSLSGYNYEVYHSLEEIQNWMHHLNKTHSGLIHMFSIGRSYEGRSLFILKLGRRSRLKRAVWIDCGIHAREWIGPAFCQWFVKEALLTYKSDPAMRKMLNHLYFYIMPVFNVDGYHFSWTNDRFWRKTRSRNSRFRCRGVDANRNWKVKWCDEGASMHPCDDTYCGPFPESEPEVKAVANFLRKHRKHIRAYLSFHAYAQMLLYPYSYKYATIPNFRCVESAAYKAVNALQSVYGVRYRYGPASTTLYVSSGSSMDWAYKNGIPYAFAFELRDTGYFGFLLPEMLIKPTCTETMLAVKNITMHLLKKCP

SEQ ID NO: 20 - DNA, 1050 bp, Homo sapiens
  CDS (1)...(1050)
atgaagtgtctcgggaagcgcaggggccaggcagctgctttcctgcctctttgctggctctttttgaagattctgcaaccggggcacagccacctttataacaaccgctatgctggtgataaagtgataagatttattcccaaaacagaagaggaagcatatgcactgaagaaaatatcctatcaacttaaggtggacctgtggcagcccagcagtatctcctatgtatcagagggaacagttactgatgtccatatcccccaaaatggttcccgagccctgttagccttcttacaggaagccaacatccagtacaaggtcctcatagaagatcttcagaaaacactggagaagggaagcagcttgcacacccagagaaaccgaagatccctctctggatataattatgaagtttatcactccttagaagaaattcaaaattggatgcatcatctgaataaaactcactcaggcctcattcacatgttctctattggaagatcatatgagggaagatctctttttattttaaagctgggcagacgatcacgactcaaaagagctgtttggatagactgtggtattcatgcaagagaatggattggtcctgccttttgtcagtggtttgtaaaagaagctcttctaacatataagagtgacccagccatgagaaaaatgttgaatcatctatatttctatatcatgcctgtgtttaacgtcgatggataccattttagttggaccaatgatcgattttggagaaaaacaaggtcaaggaactcaaggtttcgctgccgtggagtggatgccaatagaaactggaaagtgaagtggtgtgatgaaggagcttctatgcacccttgtgatgacacatactgtggcccttttccagaatctgagccggaagtgaaggctgtagctaacttccttcgaaaacacagaaagcacattagggcttatctctcctttcatgcatatgctcagatgttactgtatccctattcttacaaatatgcaacaattcccaattttagatgtgtggtaagtatt

SEQ ID NO: 21 - protein, 350 aa, Homo sapiens
MKCLGKRRGQAAAFLPLCWLFLKILQPGHSHLYNNRYAGDKVIRFIPKTEEEAYALKKISYQLKVDLWQPSSISYVSEGTVTDVHIPQNGSRALLAFLQEANIQYKVLIEDLQKTLEKGSSLHTQRNRRSLSGYNYEVYHSLEEIQNWMHHLNKTHSGLIHMFSIGRSYEGRSLFILKLGRRSRLKRAVWIDCGIHAREWIGPAFCQWFVKEALLTYKSDPAMRKMLNHLYFYIMPVFNVDGYHFSWTNDRFWRKTRSRNSRFRCRGVDANRNWKVKWCDEGASMHPCDDTYCGPFPESEPEVKAVANFLRKHRKHIRAYLSFHAYAQMLLYPYSYKYATIPNFRCVVSI

SEQ ID NO: 22 - DNA, 2128 bp, Homo sapiens
attaaagatcaggtcagctgctgctgctgctgctgctgcttgtcccaagaccaagtcgtaatagcaacttcccttcctcagctgcctgaactttttttttcccttgtagctggagagaagtgtcacattttgctcactctcaaccttcctcgcccacccccttcccggagaacctgtgcggtgtgtagagggtgctgtgagccacctccagcctcgggtggctgcttaagtaactttcaactcctctcttcttaacactatgaagtgtctcgggaagcgcaggggccaggcagctgctttcctgcctctttgctggctctttttgaagattctgcaaccggggcacagccacctttataacaaccgctatgctggtccacagggaaagaaacttttgaaataataatcagttgcctggtatactgctcaatgatattgccacacgtaagaacaagcatacagtgataaagtgataagatttattcccaaaacagaagaggaagcatatgcactgaagaaaatatcctatcaacttaaggttggttcctgcactacaggtggacctgtggcagcccagcagtatctcctatgtatcagagggaacagttactgatgtccatatcccccaaaatggttcccgagccctgttagccttcttacaggaagccaacatccagtacaaggtcctcatagaagatcttcagaaaacactggagaagggaagcagcttgcacacccagagaaaccgaagatccctctctggatataattatgaagtttatcactccttagaagaaattcaaaattggatgcatcatctgaataaaactcactcaggcctcattcacatgttctctattggaagatcatatgagggaagatctctttttattttaaagctgggcagacgatcacgactcaaaagagctgtttggatagactgtggtattcatgcaagagaatggattggtcctgccttttgtcagtggtttgtaaaagaagtcctagaaaacacagctcacaaatgtcaagaatgtactaaatttacaaaatatctctgccactaccaaaaccacaaaagtatgcttaatcttgtaagtattgagtaataaaattttctaaacattcctaaaaactcttctaacatataagagtgacccagccatgagaaaaatgttgaatcatctatatttctatatcatgcctgtgtttaacgtcgatggataccattttagttggaccaatgatcgattttggagaaaaacaaggtcaaggaactcaaggtttcgctgccgtggagtggatgccaatagaaactggaaagtgaagtggtgtgatgaaggagcttctatgcacccttgtgatgacacatactgtggcccttttccagaatctgagccggaagtgaaggctgtagctaacttccttcgaaaacacagaaagcacattagggcttatctctcctttcatgcatatgctcagatgttactgtatccctattcttacaaatatgcaacaattcccaattttagatgtgtggaatctgcagcttataaagctgtgaatgcacttcagtcagtatacggggtacgatacagatatggaccagcctccacaacgttgtatgtgagctctggtagctcaatggattgggcctacaaaaatggaataccttatgcatttgctttcgaactacgtgacactggatattttggatttttactcccagagatgctcatcaaacccacctgtacagaaactatgctggctgtgaaaaatatcacaatgcacctgctaaagaaatgtccctgagacagcccaaggctcaagtcaactgccataggattctgagcaaggcctacttggccctggatagaaattgttttcaaagagaagggcagctgcttagagtgaacatgtctatggactttaaaaagaccccacgcaattttgactttttttggggccaatttggaaaaaacagttaagtatttgaccctgtgcatgtacatcaggcttcatgctgcttttctgaagctaagatggttctaagtactaatgataatggcaaacacatgtttgtgtttatcctaataaatattttacatgtgaaaaaaaaaaaaaaaaa

SEQ ID NO: 23 - DNA, 1056 bp, Homo sapiens
  CDS (1)...(1056)
atgcagggcacccctggaggcgggacgcgccctgggccatcccccgtggacaggcggacactcctggtcttcagctttatcctggcagcagctttgggccaaatgaatttcacaggggaccaggttcttcgagtcctggccaaagatgagaagcagctttcacttctcggggatctggagggcctgaaaccccagaaggtggacttctggcgtggcccagccaggcccagcctccctgtggatatgagagttcctttctctgaactgaaagacatcaaagcttatctggagtctcatggacttgcttacagcatcatgataaaggacatccaggtgctgctggatgaggaaagacaggccatggcgaaatcccgccggctggagcgcagcaccaacagcttcagttactcatcataccacaccctggaggagatatatagctggattgacaactttgtaatggagcattccgatattgtctcaaaaattcagattggcaacagctttgaaaaccagtccattcttgtcctgaagttcagcactggaggttctcggcacccagccatctggatcgacactggaattcactcccgggagtggatcacccatgccaccggcatctggactgccaataagattgtcagtgattatggcaaagaccgtgtcctgacagacatactgaatgccatggacatcttcatagagctcgtcacaaaccctgatgggtttgcttttacccacagcatgaaccgcttatggcggaagaacaagtccatcagacctggaatcttctgcatcggcgtggatctcaacaggaactggaagtcgggttttggaggaaatggttctaacagcaacccctgctcagaaacttatcacgggccctcccctcagtcggagccggaggtggctgccatagtgaacttcatcacagcccatggcaacttcaaggctctgatctccatccacagctactctcagatgcttatgtacccttacggccgattgctggagcccgtttcaaatcagagggagttggtgagactggctgcttag

SEQ ID NO: 24 - protein, 351 aa, Homo sapiens
MQGTPGGGTRPGPSPVDRRTLLVFSFILAAALGQMNFTGDQVLRVLAKDEKQLSLLGDLEGLKPQKVDFWRGPARPSLPVDMRVPFSELKDIKAYLESHGLAYSIMIKDIQVLLDEERQAMAKSRRLERSTNSFSYSSYHTLEEIYSWIDNFVMEHSDIVSKIQIGNSFENQSILVLKFSTGGSRHPAIWIDTGIHSREWITHATGIWTANKIVSDYGKDRVLTDILNAMDIFIELVTNPDGFAFTHSMNRLWRKNKSIRPGIFCIGVDLNRNWKSGFGGNGSNSNPCSETYHGPSPQSEPEVAAIVNFITAHGNFKALISIHSYSQMLMYPYGRLLEPVSNQRELVRLAA

SEQ ID NO: 25 - DNA, 945 bp, Homo sapiens
  CDS (1)...(945)
atgcagggcacccctggaggcgggacgcgccctgggccatcccccgtggacaggcggacactcctggtcttcagctttatcctggcagcagctttgggccaaatgaatttcacaggggaccaggttcttcgagtcctggccaaagatgagaagcagctttcacttctcggggatctggagggcctgaaaccccagaaggtggacttctggcgtggcccagccaggcccagcctccctgtggatatgagagttcctttctctgaactgaaagacatcaaagcttatctggagtctcatggacttgcttacagcatcatgataaaggacatccaggtgctgctggatgaggaaagacaggccatggcgaaatcccgccggctggagcgcagcaccaacagcttcagttactcatcataccacaccctggaggagatatatagctggattgacaactttgtaatggagcattccgatattgtctcaaaaattcagattggcaacagctttgaaaaccagtccattcttgtcctgaagttcagcactggaggttctcggcacccagccatctggatcgacactggaattcactcccgggagtggatcacccatgccaccggcatctggactgccaataagaaccgcttatggcggaagaacaagtccatcagacctggaatcttctgcatcggcgtggatctcaacaggaactggaagtcgggttttggaggaaatggttctaacagcaacccctgctcagaaacttatcacgggccctcccctcagtcggagccggaggtggctgccatagtgaacttcatcacagcccatggcaacttcaaggctctgatctccatccacagctactctcagatgcttatgtacccttacggccgattgctggagcccgtttcaaatcagagggagttggtgagactggctgcttag

SEQ ID NO: 26 - protein, 314 aa, Homo sapiens
MQGTPGGGTRPGPSPVDRRTLLVFSFILAAALGQMNFTGDQVLRVLAKDEKQLSLLGDLEGLKPQKVDFWRGPARPSLPVDMRVPFSELKDIKAYLESHGLAYSIMIKDIQVLLDEERQAMAKSRRLERSTNSFSYSSYHTLEEIYSWIDNFVMEHSDIVSKIQIGNSFENQSILVLKFSTGGSRHPAIWIDTGIHSREWITHATGIWTANKNRLWRKNKSIRPGIFCIGVDLNRNWKSGFGGNGSNSNPCSETYHGPSPQSEPEVAAIVNFITAHGNFKALISIHSYSQMLMYPYGRLLEPVSNQRELVRLAA

SEQ ID NO: 27 - DNA, 1311 bp, Homo sapiens
  CDS (1)...(1311)
atgcagggcacccctggaggcgggacgcgccctgggccatcccccgtggacaggcggacactcctggtcttcagctttatcctggcagcagctttgggccaaatgaatttcacaggggaccaggttcttcgagtcctggccaaagatgagaagcagctttcacttctcggggatctggagggcctgaaaccccagaaggtggacttctggcgtggcccagccaggcccagcctccctgtggatatgagagttcctttctctgaactgaaagacatcaaagcttatctggagtctcatggacttgcttacagcatcatgataaaggacatccaggtgctgctggatgaggaaagacaggccatggcgaaatcccgccggctggagcgcagcaccaacagcttcagttactcatcataccacaccctggaggagatatatagctggattgacaactttgtaatggagcattccgatattgtctcaaaaattcagattggcaacagctttgaaaaccagtccattcttgtcctgaagttcagcactggaggttctcggcacccagccatctggatcgacactggaattcactcccgggagtggatcacccatgccaccggcatctggactgccaataagattgtcagtgattatggcaaagaccgtgtcctgacagacatactgaatgccatggacatcttcatagagctcgtcacaaaccctgatgggtttgcttttacccacagcatgaaccgcttatggcggaagaacaagtccatcagacctggaatcttctgcatcggcgtggatctcaacaggaactggaagtcgggttttggaggaaatggttctaacagcaacccctgctcagaaacttatcacgggccctcccctcagtcggagccggaggtggctgccatagtgaacttcatcacagcccatggcaacttcaaggctctgatctccatccacagctactctcagatgcttatgtacccttacggccgattgctggagcccgtttcaaatcagagggagttgtacgatcttgccaaggatgcggtggaggccttgtataaggtccatgggatcgagtacatttttggcagcatcagcaccaccctctatgtggccagtgggatcaccgtcgactgggcctatgacagtggcatcaagtacgccttcagctttgagctccgggacactgggcagtatggcttcctgctgccggccacacagatcatccccacggcccaggagacgtggatggcgcttcggaccatcatggagcacaccctgaatcacccctactag

SEQ ID NO: 28 - protein, 436 aa, Homo sapiens
MQGTPGGGTRPGPSPVDRRTLLVFSFILAAALGQMNFTGDQVLRVLAKDEKQLSLLGDLEGLKPQKVDFWRGPARPSLPVDMRVPFSELKDIKAYLESHGLAYSIMIKDIQVLLDEERQAMAKSRRLERSTNSFSYSSYHTLEEIYSWIDNFVMEHSDIVSKIQIGNSFENQSILVLKFSTGGSRHPAIWIDTGIHSREWITHATGIWTANKIVSDYGKDRVLTDILNAMDIFIELVTNPDGFAFTHSMNRLWRKNKSIRPGIFCIGVDLNRNWKSGFGGNGSNSNPCSETYHGPSPQSEPEVAAIVNFITAHGNFKALISIHSYSQMLMYPYGRLLEPVSNQRELYDLAKDAVEALYKVHGIEYIFGSISTTLYVASGITVDWAYDSGIKYAFSFELRDTGQYGFLLPATQIIPTAQETWMALRTIMEHTLNHPY

SEQ ID NO: 29 - DNA, 1200 bp, Homo sapiens
  CDS (1)...(1200)
atgcagggcacccctggaggcgggacgcgccctgggccatcccccgtggacaggcggacactcctggtcttcagctttatcctggcagcagctttgggccaaatgaatttcacaggggaccaggttcttcgagtcctggccaaagatgagaagcagctttcacttctcggggatctggagggcctgaaaccccagaaggtggacttctggcgtggcccagccaggcccagcctccctgtggatatgagagttcctttctctgaactgaaagacatcaaagcttatctggagtctcatggacttgcttacagcatcatgataaaggacatccaggtgctgctggatgaggaaagacaggccatggcgaaatcccgccggctggagcgcagcaccaacagcttcagttactcatcataccacaccctggaggagatatatagctggattgacaactttgtaatggagcattccgatattgtctcaaaaattcagattggcaacagctttgaaaaccagtccattcttgtcctgaagttcagcactggaggttctcggcacccagccatctggatcgacactggaattcactcccgggagtggatcacccatgccaccggcatctggactgccaataagaaccgcttatggcggaagaacaagtccatcagacctggaatcttctgcatcggcgtggatctcaacaggaactggaagtcgggttttggaggaaatggttctaacagcaacccctgctcagaaacttatcacgggccctcccctcagtcggagccggaggtggctgccatagtgaacttcatcacagcccatggcaacttcaaggctctgatctccatccacagctactctcagatgcttatgtacccttacggccgattgctggagcccgtttcaaatcagagggagttgtacgatcttgccaaggatgcggtggaggccttgtataaggtccatgggatcgagtacatttttggcagcatcagcaccaccctctatgtggccagtgggatcaccgtcgactgggcctatgacagtggcatcaagtacgccttcagctttgagctccgggacactgggcagtatggcttcctgctgccggccacacagatcatccccacggcccaggagacgtggatggcgcttcggaccatcatggagcacaccctgaatcacccctactag

SEQ ID NO: 30 - protein, 399 aa, Homo sapiens
MQGTPGGGTRPGPSPVDRRTLLVFSFILAAALGQMNFTGDQVLRVLAKDEKQLSLLGDLEGLKPQKVDFWRGPARPSLPVDMRVPFSELKDIKAYLESHGLAYSIMIKDIQVLLDEERQAMAKSRRLERSTNSFSYSSYHTLEEIYSWIDNFVMEHSDIVSKIQIGNSFENQSILVLKFSTGGSRHPAIWIDTGIHSREWITHATGIWTANKNRLWRKNKSIRPGIFCIGVDLNRNWKSGFGGNGSNSNPCSETYHGPSPQSEPEVAAIVNFITAHGNFKALISIHSYSQMLMYPYGRLLEPVSNQRELYDLAKDAVEALYKVHGIEYIFGSISTTLYVASGITVDWAYDSGIKYAFSFELRDTGQYGFLLPATQIIPTAQETWMALRTIMEHTLNHPY

SEQ ID NO: 31 - DNA, 1056 bp, Homo sapiens; identical to SEQ ID NO: 23
  CDS (1)...(1056)

SEQ ID NO: 32 - protein, 351 aa, Homo sapiens; identical to SEQ ID NO: 24

SEQ ID NO: 33 - DNA, 945 bp, Homo sapiens; identical to SEQ ID NO: 25
  CDS (1)...(945)

SEQ ID NO: 34 - protein, 314 aa, Homo sapiens; identical to SEQ ID NO: 26

SEQ ID NO: 35 - DNA, 210 bp, Homo sapiens
  CDS (1)...(210)
atgatgtttttgaacaagaagacrccccatgggtgctgtgctgtcctgaggcctgggccatggtgcccaaggaaagcccctgaagctcaccaggaggaagaagcatgcagggcacccctggaggcgggacgcgccctgggccatcccccgtggacaggcggacactcctggtcttcagctttatcctggcagcagctttgggccaaatga

SEQ ID NO: 36 - protein, 69 aa, Homo sapiens
  VARIANT (1)...(69): Xaa = Any Amino Acid
MMFLNKKXPHGCCAVLRPGPWCPRKAPEAHQEEEACRAPLEAGRALGHPPWTGGHSWSSALSWQQLWAK

SEQ ID NO: 37 - DNA, 2247 bp, Homo sapiens
ctctctctctcttttactcttactctttctctctcactctctctcttttcccacccttaagccaagtacagggatagttgtctcatcattggtggcttaaaatgatgtttttgaacaagaagacrccccatgggtacttttggtgactagcactatctctgtktttttccttttaaattcctgagctattgtttagcagtacacccttttatctccattgctactgaagctgaatgttacttgggtggaaagcataactgctttcttttctatgtccttaaaccctttgataatgttactgtttgagagtccctgaagccaggatactagaagagtctggcttgtctgaacagctgaactacgaaataatggagtagggcaggctttaccaagccaattcactcaagttgtctcatctataccccttcaaaccctgtgagctgtgactaaaagctgggctttccagcctctaggtgctgtgctgtcctgaggcctgggccatggtgcccaaggaaagcccctgaagctcaccaggaggaagaagcatgcagggcacccctggaggcgggacgcgccctgggccatcccccgtggacaggcggacactcctggtcttcagctttatcctggcagcagctttgggccaaatgaatttcacaggggaccaggttcttcgagtcctggccaaagatgagaagcagctttcacttctcggggatctggagggcctgaaaccccagaaggtggacttctggcgtggcccagccaggcccagcctccctgtggatatgagagttcctttctctgaactgaaagacatcaaagcttatctggagtctcatggacttgcttacagcatcatgataaaggacatccaggtgctgctggatgaggaaagacaggccatggcgaaatcccgccggctggagcgcagcaccaacagcttcagttactcatcataccacaccctggaggagatatatagctggattgacaactttgtaatggagcattccgatattgtctcaaaaattcagattggcaacagctttgaaaaccagtccattcttgtcctgaagttcagcactggaggttctcggcacccagccatctggatcgacactggaattcactcccgggagtggatcacccatgccaccggcatctggactgccaataagattgtcagtgattatggcaaagaccgtgtcctgacagacatactgaatgccatggacatcttcatagagctcgtcacaaaccctgatgggtttgcttttacccacagcatgaaccgcttatggcggaagaacaagtccatcagacctggaatcttctgcatcggcgtggatctcaacaggaactggaagtcgggttttggaggaaatggttctaacagcaacccctgctcagaaacttatcacgggccctcccctcagtcggagccggaggtggctgccatagtgaacttcatcacagcccatggcaacttcaaggctctgatctccatccacagctactctcagatgcttatgtacccttacggccgattgctggagcccgtttcaaatcagagggagttggtgagactggctgcttagggcctggggagaagagaccgcttcacagaaaaatccatatctgtcatactcccagagggctcaggttgttactctgaatgcaggggtctgggctgattgaccccatggtgcggggggtggggtagggggagcttgctgttctcacgtgtgatcaagttcaaagctggaaatgctgtgctccttctcacaagggccatctcacttcaacttcaggactgctaaatcatgcttacgatcttgccaaggatgcggtggaggccttgtataaggtccatgggatcgagtacatttttggcagcatcagcaccaccctctatgtggccagtgggatcaccgtcgactgggcctatgacagtggcatcaagtacgccttcagctttgagctccgggacactgggcagtatggcttcctgctgccggccacacagatcatccccacggcccaggagacgtggatggcgcttcggaccatcatggagcacaccctgaatcacccctactagcagcacgactgagggcaggaggctccatccttctccccaaggtctgtggctcctcccgaaacccaagttatgcatccccatccccatgccctcatcccgacctcttagaaaataaatacaagtttgaaaaaaaaaaaaaaaaa

SEQ ID NO: 38 - DNA, 2727 bp, Homo sapiens
  CDS (1)...(2727)
atggaaattttgtggaagacgttgacctggattttgagcctcatcatggcttcatcggaatttcatagtgaccacaggctttcatacagttctcaagaggaattcctgacttatcttgaacactaccagctaactattccaataagggttgatcaaaatggagcatttctcagctttactgtgaaaaatgataaacactcaaggagaagacggagtatggaccctattgatccacagcaggcagtatctaagttattttttaaactttcagcctatggcaagcactttcatctaaacttgactctcaacacagattttgtgtccaaacattttacagtagaatattgggggaaagatggaccccagtggaaacatgattttttagacaactgtcattacacaggatatttgcaagatcaacgtagtacaactaaagtggctttaagcaactgtgttgggttgcatggtgttattgctacagaagatgaagagtattttatcgaacctttaaagaataccacagaggattccaagcattttagttatgaaaatggccaccctcatgttatttacaaaaagtctgcccttcaacaacgacatctgtatgatcactctcattgtggggtttcggatttcacaagaagtggcaaaccttggtggctgaatgacacatccactgtttcttattcactaccaattaacaacacacatatccaccacagacagaagagatcagtgagcattgaacggtttgtggagacattggtagtggcagacaaaatgatggtgggctaccatggccgcaaagacattgaacattacattttgagtgtgatgaatattgttgccaaactttaccgtgattccagcctaggaaacgttgtgaatattatagtggcccgcttaattgttctcacagaagatcagccaaacttggagataaaccaccatgcagacaagtccctcgatagcttctgtaaatggcagaaatccattctctcccaccaaagtgatggaaacaccattccagaaaatgggattgcccaccacgataatgcagttcttattactagatatgatatctgcacttataaaaataagccctgtggaacactgggcttggcctctgtggctggaatgtgtgagcctgaaaggagctgcagcattaatgaagacattggcctgggttcagcttttaccattgcacatgagattggtcacaattttggtatgaaccatgatggaattggaaattcttgtgggacgaaaggtcatgaagcagcaaaacttatggcagctcacattactgcgaataccaatcctttttcctggtctgcttgcagtcgagactacatcaccagctttctagattcaggccgtggtacttgccttgataatgagcctcccaagcgtgactttctttatccagctgtggccccaggtcaggtgtatgatgctgatgagcaatgtcgtttccagtatggagcaacctcccgccaatgtaaatatggggaagtgtgtagagagctctggtgtctcagcaaaagcaaccgctgtgtcaccaacagtattccagcagctgaggggacactgtgtcaaactgggaatattgaaaaagggtggtgttatcagggagattgtgttccttttggcacttggccccagagcatagatgggggctggggtccctggtcactatggggagagtgcagcaggacctgcgggggaggcgtctcctcatccctaagacactgtgacagtccagcaccttcaggaggtggaaaatattgccttggggaaaggaaacggtatcgctcctgtaacacagatccatgccctttgggttcccgagattttcgagagaaacagtgtgcagactttgacaatatgcctttccgaggaaagtattataactggaaaccctatactggaggtggggtaaaaccttgtgcattaaactgcttggctgaaggttataatttctacactgaacgtgctcctgcggtgatcgatgggacccagtgcaatgcggattcactggatatctgcatcaatggagaatgcaagcacgtaggctgtgataatattttgggatctgatgctagggaagatagatgtcgagtctgtggaggggacggaagcacatgtgatgccattgaagggttcttcaatgattcactgcccaggggaggctacatggaagtggtgcagataccaagaggctctgttcacattgaagttagagaagttgccatgtcaaagaactatattgctttaaaatctgaaggagatgattactatattaatggtgcctggactattgactggcctaggaaatttgatgttgctgggacagcttttcattacaagagaccaactgatgaaccagaatccttggaagctctaggtcctacctcagaaaatctcatcgtcatggttctgcttcaagaacagaatttgggaattaggtataagttcaatgttcccatcactcgaactggcagtggagataatgaagttggctttacatggaatcatcagccttggtcagaatgctcagctacttgtgctggaggtaagatgcccactaggcagcccacccagagggcaagatggagaacaaaacacattctgagctatgctttgtgtttgttaaaaaagctaattggaaacatttcttgcaggtttgcttcaagctgtaatttagcaaaagaaactttgctttaa

SEQ ID NO: 39 - protein, 908 aa, Homo sapiens
MEILWKTLTWILSLIMASSEFHSDHRLSYSSQEEFLTYLEHYQLTIPIRVDQNGAFLSFTVKNDKHSRRRRSMDPIDPQQAVSKLFFKLSAYGKHFHLNLTLNTDFVSKHFTVEYWGKDGPQWKHDFLDNCHYTGYLQDQRSTTKVALSNCVGLHGVIATEDEEYFIEPLKNTTEDSKHFSYENGHPHVIYKKSALQQRHLYDHSHCGVSDFTRSGKPWWLNDTSTVSYSLPINNTHIHHRQKRSVSIERFVETLVVADKMMVGYHGRKDIEHYILSVMNIVAKLYRDSSLGNVVNIIVARLIVLTEDQPNLEINHHADKSLDSFCKWQKSILSHQSDGNTIPENGIAHHDNAVLITRYDICTYKNKPCGTLGLASVAGMCEPERSCSINEDIGLGSAFTIAHEIGHNFGMNHDGIGNSCGTKGHEAAKLMAAHITANTNPFSWSACSRDYITSFLDSGRGTCLDNEPPKRDFLYPAVAPGQVYDADEQCRFQYGATSRQCKYGEVCRELWCLSKSNRCVTNSIPAAEGTLCQTGNIEKGWCYQGDCVPFGTWPQSIDGGWGPWSLWGECSRTCGGGVSSSLRHCDSPAPSGGGKYCLGERKRYRSCNTDPCPLGSRDFREKQCADFDNMPFRGKYYNWKPYTGGGVKPCALNCLAEGYNFYTERAPAVIDGTQCNADSLDICINGECKHVGCDNILGSDAREDRCRVCGGDGSTCDAIEGFFNDSLPRGGYMEVVQIPRGSVHIEVREVAMSKNYIALKSEGDDYYINGAWTIDWPRKFDVAGTAFHYKRPTDEPESLEALGPTSENLIVMVLLQEQNLGIRYKFNVPITRTGSGDNEVGFTWNHQPWSECSATCAGGKMPTRQPTQRARWRTKHILSYALCLLKKLIGNISCRFASSCNLAKETLL

SEQ ID NO: 40 - DNA, 879 bp, Homo sapiens
  CDS (1)...(879)
atggaaattttgtggaagacgttgacctggattttgagcctcatcatggcttcatcggaatttcatagtgaccacaggctttcatacagttctcaagaggaattcctgacttatcttgaacactaccagctaactattccaataagggttgatcaaaatggagcatttctcagctttactgtgaaaaatgataaacactcaaggagaagacggagtatggaccctattgatccacagcaggcagtatctaagttattttttaaactttcagcctatggcaagcactttcatctaaacttgactctcaacacagattttgtgtccaaacattttacagtagaatattgggggaaagatggaccccagtggaaacatgattttttagacaactgtcattacacaggatatttgcaagatcaacgtagtacaactaaagtggctttaagcaactgtgttgggttgcatggtgttattgctacagaagatgaagagtattttatcgaacctttaaagaataccacagaggattccaagcattttagttatgaaaatggccaccctcatgttatttacaaaaagtctgcccttcaacaacgacatctgtatgatcactctcattgtggggtttcggatttcacaagaagtggcaaaccttggtggctgaatgacacatccactgtttcttattcactaccaattaacaacacacatatccaccacagacagaagagatcagtgagcattgaacggtttgtggagacattggtagtggcagacaaaatgatggtgggctaccatggccgcaaagacattgaacattacattttgagtgtgatgaatattgtcaggttgccaaactttaccgtgattccagcctag

SEQ ID NO: 41 - protein, 292 aa, Homo sapiens
MEILWKTLTWILSLIMASSEFHSDHRLSYSSQEEFLTYLEHYQLTIPIRVDQNGAFLSFTVKNDKHSRRRRSMDPIDPQQAVSKLFFKLSAYGKHFHLNLTLNTDFVSKHFTVEYWGKDGPQWKHDFLDNCHYTGYLQDQRSTTKVALSNCVGLHGVIATEDEEYFIEPLKNTTEDSKHFSYENGHPHVIYKKSALQQRHLYDHSHCGVSDFTRSGKPWWLNDTSTVSYSLPINNTHIHHRQKRSVSIERFVETLVVADKMMVGYHGRKDIEHYILSVMNIVRLPNFTVIPA

SEQ ID NO: 42 - DNA, 1407 bp, Homo sapiens
  CDS (1)...(1407)
atggaaattttgtggaagacgttgacctggattttgagcctcatcatggcttcatcggaatttcatagtgaccacaggctttcatacagttctcaagaggaattcctgacttatcttgaacactaccagctaactattccaataagggttgatcaaaatggagcatttctcagctttactgtgaaaaatgataaacactcaaggagaagacggagtatggaccctattgatccacagcaggcagtatctaagttattttttaaactttcagcctatggcaagcactttcatctaaacttgactctcaacacagattttgtgtccaaacattttacagtagaatattgggggaaagatggaccccagtggaaacatgattttttagacaactgtcattacacaggatatttgcaagatcaacgtagtacaactaaagtggctttaagcaactgtgttgggttgcatggtgttattgctacagaagatgaagagtattttatcgaacctttaaagaataccacagaggattccaagcattttagttatgaaaatggccaccctcatgttatttacaaaaagtctgcccttcaacaacgacatctgtatgatcactctcattgtggggtttcggatttcacaagaagtggcaaaccttggtggctgaatgacacatccactgtttcttattcactaccaattaacaacacacatatccaccacagacagaagagatcagtgagcattgaacggtttgtggagacattggtagtggcagacaaaatgatggtgggctaccatggccgcaaagacattgaacattacattttgagtgtgatgaatattgttgccaaactttaccgtgattccagcctaggaaacgttgtgaatattatagtggcccgcttaattgttctcacagaagatcagccaaacttggagataaaccaccatgcagacaagtccctcgatagcttctgtaaatggcagaaatccattctctcccaccaaagtgatggaaacaccattccagaaaatgggattgcccaccacgataatgcagttcttattactagatatgatatctgcacttataaaaataagccctgtggaacactgggcttggcctctgtggctggaatgtgtgagcctgaaaggagctgcagcattaatgaagacattggcctgggttcagcttttaccattgcacatgagattggtcacaattttggtatgaaccatgatggaattggaaattcttgtgggacgaaaggtcatgaagcagcaaaacttatggcagctcacattactgcgaataccaatcctttttcctggtctgcttgcagtcgagactacatcaccagctttctagaatttcttaaactcggtgattcaataagtggttcatga

SEQ ID NO: 43 - protein, 468 aa, Homo sapiens
MEILWKTLTWILSLIMASSEFHSDHRLSYSSQEEFLTYLEHYQLTIPIRVDQNGAFLSFTVKNDKHSRRRRSMDPIDPQQAVSKLFFKLSAYGKHFHLNLTLNTDFVSKHFTVEYWGKDGPQWKHDFLDNCHYTGYLQDQRSTTKVALSNCVGLHGVIATEDEEYFIEPLKNTTEDSKHFSYENGHPHVIYKKSALQQRHLYDHSHCGVSDFTRSGKPWWLNDTSTVSYSLPINNTHIHHRQKRSVSIERFVETLVVADKMMVGYHGRKDIEHYILSVMNIVAKLYRDSSLGNVVNIIVARLIVLTEDQPNLEINHHADKSLDSFCKWQKSILSHQSDGNTIPENGIAHHDNAVLITRYDICTYKNKPCGTLGLASVAGMCEPERSCSINEDIGLGSAFTIAHEIGHNFGMNHDGIGNSCGTKGHEAAKLMAAHITANTNPFSWSACSRDYITSFLEFLKLGDSISGS

SEQ ID NO: 44 - DNA, 933 bp, Homo sapiens
  CDS (1)...(933)
atggaaattttgtggaagacgttgacctggattttgagcctcatcatggcttcatcggaatttcatagtgaccacaggctttcatacagttctcaagaggaattcctgacttatcttgaacactaccagctaactattccaataagggttgatcaaaatggagcatttctcagctttactgtgaaaaatgataaacactcaaggagaagacggagtatggaccctattgatccacagcaggcagtatctaagttattttttaaactttcagcctatggcaagcactttcatctaaacttgactctcaacacagattttgtgtccaaacattttacagtagaatattgggggaaagatggaccccagtggaaacatgattttttagacaactgtcattacacaggatatttgcaagatcaacgtagtacaactaaagtggctttaagcaactgtgttgggttgcatggtgttattgctacagaagatgaagagtattttatcgaacctttaaagaataccacagaggattccaagcattttagttatgaaaatggccaccctcatgttatttacaaaaagtctgcccttcaacaacgacatctgtatgatcactctcattgtggggtttcggatttcacaagaagtggcaaaccttggtggctgaatgacacatccactgtttcttattcactaccaattaacaacacacatatccaccacagacagaagagatcagtgagcattgaacggtttgtggagacattggtagtggcagacaaaatgatggtgggctaccatggccgcaaagacattgaacattacattttgagtgtgatgaatattgttgccaaactttaccgtgattccagcctaggaaacgttgtgaatattatagtggcccgcttaattgttctcacagaagatcagatatga

SEQ ID NO: 45 - protein, 310 aa, Homo sapiens
MEILWKTLTWILSLIMASSEFHSDHRLSYSSQEEFLTYLEHYQLTIPIRVDQNGAFLSFTVKNDKHSRRRRSMDPIDPQQAVSKLFFKLSAYGKHFHLNLTLNTDFVSKHFTVEYWGKDGPQWKHDFLDNCHYTGYLQDQRSTTKVALSNCVGLHGVIATEDEEYFIEPLKNTTEDSKHFSYENGHPHVIYKKSALQQRHLYDHSHCGVSDFTRSGKPWWLNDTSTVSYSLPINNTHIHHRQKRSVSIERFVETLVVADKMMVGYHGRKDIEHYILSVMNIVAKLYRDSSLGNVVNIIVARLIVLTEDQI

SEQ ID NO: 46 - DNA, 1524 bp, Homo sapiens
  CDS (1)...(1524)
atggaaattttgtggaagacgttgacctggattttgagcctcatcatggcttcatcggaatttcatagtgaccacaggctttcatacagttctcaagaggaattcctgacttatcttgaacactaccagctaactattccaataagggttgatcaaaatggagcatttctcagctttactgtgaaaaatgataaacactcaaggagaagacggagtatggaccctattgatccacagcaggcagtatctaagttattttttaaactttcagcctatggcaagcactttcatctaaacttgactctcaacacagattttgtgtccaaacattttacagtagaatattgggggaaagatggaccccagtggaaacatgattttttagacaactgtcattacacaggatatttgcaagatcaacgtagtacaactaaagtggctttaagcaactgtgttgggttgcatggtgttattgctacagaagatgaagagtattttatcgaacctttaaagaataccacagaggattccaagcattttagttatgaaaatggccaccctcatgttatttacaaaaagtctgcccttcaacaacgacatctgtatgatcactctcattgtggggtttcggatttcacaagaagtggcaaaccttggtggctgaatgacacatccactgtttcttattcactaccaattaacaacacacatatccaccacagacagaagagatcagtgagcattgaacggtttgtggagacattggtagtggcagacaaaatgatggtgggctaccatggccgcaaagacattgaacattacattttgagtgtgatgaatattgttgccaaactttaccgtgattccagcctaggaaacgttgtgaatattatagtggcccgcttaattgttctcacagaagatcagccaaacttggagataaaccaccatgcagacaagtccctcgatagcttctgtaaatggcagaaatccattctctcccaccaaagtgatggaaacaccattccagaaaatgggattgcccaccacgataatgcagttcttattactagatatgatatctgcacttataaaaataagccctgtggaacactgggcttggcctctgtggctggaatgtgtgagcctgaaaggagctgcagcattaatgaagacattggcctgggttcagcttttaccattgcacatgagattggtcacaattttggtatgaaccatgatggaattggaaattcttgtgggacgaaaggtcatgaagcagcaaaacttatggcagctcacattactgcgaataccaatcctttttcctggtctgcttgcagtcgagactacatcaccagctttctagattcaggccgtggtacttgccttgataatgagcctcccaagcgtgactttctttatccagctgtggccccaggtcaggtgtatgatgctgatgagcaatgtcgtttccagtatggagcaacctcccgccaatgtaaatatggggtctttagataa

SEQ ID NO: 47 - protein, 507 aa, Homo sapiens
MEILWKTLTWILSLIMASSEFHSDHRLSYSSQEEFLTYLEHYQLTIPIRVDQNGAFLSFTVKNDKHSRRRRSMDPIDPQQAVSKLFFKLSAYGKHFHLNLTLNTDFVSKHFTVEYWGKDGPQWKHDFLDNCHYTGYLQDQRSTTKVALSNCVGLHGVIATEDEEYFIEPLKNTTEDSKHFSYENGHPHVIYKKSALQQRHLYDHSHCGVSDFTRSGKPWWLNDTSTVSYSLPINNTHIHHRQKRSVSIERFVETLVVADKMMVGYHGRKDIEHYILSVMNIVAKLYRDSSLGNVVNIIVARLIVLTEDQPNLEINHHADKSLDSFCKWQKSILSHQSDGNTIPENGIAHHDNAVLITRYDICTYKNKPCGTLGLASVAGMCEPERSCSINEDIGLGSAFTIAHEIGHNFGMNHDGIGNSCGTKGHEAAKLMAAHITANTNPFSWSACSRDYITSFLDSGRGTCLDNEPPKRDFLYPAVAPGQVYDADEQCRFQYGATSRQCKYGVFR

SEQ ID NO: 48 - DNA, 1770 bp, Homo sapiens
  CDS (1)...(1770)
atggaaattttgtggaagacgttgacctggattttgagcctcatcatggcttcatcggaatttcatagtgaccacaggctttcatacagttctcaagaggaattcctgacttatcttgaacactaccagctaactattccaataagggttgatcaaaatggagcatttctcagctttactgtgaaaaatgataaacactcaaggagaagacggagtatggaccctattgatccacagcaggcagtatctaagttattttttaaactttcagcctatggcaagcactttcatctaaacttgactctcaacacagattttgtgtccaaacattttacagtagaatattgggggaaagatggaccccagtggaaacatgattttttagacaactgtcattacacaggatatttgcaagatcaacgtagtacaactaaagtggctttaagcaactgtgttgggttgcatggtgttattgctacagaagatgaagagtattttatcgaacctttaaagaataccacagaggattccaagcattttagttatgaaaatggccaccctcatgttatttacaaaaagtctgcccttcaacaacgacatctgtatgatcactctcattgtggggtttcggatttcacaagaagtggcaaaccttggtggctgaatgacacatccactgtttcttattcactaccaattaacaacacacatatccaccacagacagaagagatcagtgagcattgaacggtttgtggagacattggtagtggcagacaaaatgatggtgggctaccatggccgcaaagacattgaacattacattttgagtgtgatgaatattgttgccaaactttaccgtgattccagcctaggaaacgttgtgaatattatagtggcccgcttaattgttctcacagaagatcagccaaacttggagataaaccaccatgcagacaagtccctcgatagcttctgtaaatggcagaaatccattctctcccaccaaagtgatggaaacaccattccagaaaatgggattgcccaccacgataatgcagttcttattactagatatgatatctgcacttataaaaataagccctgtggaacactgggcttggcctctgtggctggaatgtgtgagcctgaaaggagctgcagcattaatgaagacattggcctgggttcagcttttaccattgcacatgagattggtcacaattttggtatgaaccatgatggaattggaaattcttgtgggacgaaaggtcatgaagcagcaaaacttatggcagctcacattactgcgaataccaatcctttttcctggtctgcttgcagtcgagactacatcaccagctttctagattcaggccgtggtacttgccttgataatgagcctcccaagcgtgactttctttatccagctgtggccccaggtcaggtgtatgatgctgatgagcaatgtcgtttccagtatggagcaacctcccgccaatgtaaatatggggaagtgtgtagagagctctggtgtctcagcaaaagcaaccgctgtgtcaccaacagtattccagcagctgaggggacactgtgtcaaactgggaatattgaaaaagggtggtgttatcagggagattgtgttccttttggcacttggccccagagcatagatgggggctggggtccctggtcactatggggagagtgcagcaggacctgcgggggaggcgtctcctcatccctaagacactgtgacagtccagcgtaa

SEQ ID NO: 49 - protein, 589 aa, Homo sapiens
MEILWKTLTWILSLIMASSEFHSDHRLSYSSQEEFLTYLEHYQLTIPIRVDQNGAFLSFTVKNDKHSRRRRSMDPIDPQQAVSKLFFKLSAYGKHFHLNLTLNTDFVSKHFTVEYWGKDGPQWKHDFLDNCHYTGYLQDQRSTTKVALSNCVGLHGVIATEDEEYFIEPLKNTTEDSKHFSYENGHPHVIYKKSALQQRHLYDHSHCGVSDFTRSGKPWWLNDTSTVSYSLPINNTHIHHRQKRSVSIERFVETLVVADKMMVGYHGRKDIEHYILSVMNIVAKLYRDSSLGNVVNIIVARLIVLTEDQPNLEINHHADKSLDSFCKWQKSILSHQSDGNTIPENGIAHHDNAVLITRYDICTYKNKPCGTLGLASVAGMCEPERSCSINEDIGLGSAFTIAHEIGHNFGMNHDGIGNSCGTKGHEAAKLMAAHITANTNPFSWSACSRDYITSFLDSGRGTCLDNEPPKRDFLYPAVAPGQVYDADEQCRFQYGATSRQCKYGEVCRELWCLSKSNRCVTNSIPAAEGTLCQTGNIEKGWCYQGDCVPFGTWPQSIDGGWGPWSLWGECSRTCGGGVSSSLRHCDSPA

SEQ ID NO: 50 - DNA, 426 bp, Homo sapiens
  CDS (1)...(426)
atgaaaacgcatggtgttattgctacagaagatgaagagtattttatcgaacctttaaagaataccacagaggattccaagcattttagttatgaaaatggccaccctcatgttatttacaaaaagtctgcccttcaacaacgacatctgtatgatcactctcattgtggggtttcggatttcacaagaagtggcaaaccttggtggctgaatgacacatccactgtttcttattcactaccaattaacaacacacatatccaccacagacagaagagatcagtgagcattgaacggtttgtggagacattggtagtggcagacaaaatgatggtgggctaccatggccgcaaagacattgaacattacattttgagtgtgatgaatattgtcaggttgccaaactttaccgtgattccagcctag

SEQ ID NO: 51 - protein, 141 aa, Homo sapiens [sequence omitted]

SEQ ID NO: 52 - DNA, 954 bp, Homo sapiens
  CDS (1)...(954)
atgaaaacgcatggtgttattgctacagaagatgaagagtattttatcgaacctttaaagaataccacagaggattccaagcattttagttatgaaaatggccaccctcatgttatttacaaaaagtctgcccttcaacaacgacatctgtatgatcactctcattgtggggtttcggatttcacaagaagtggcaaaccttggtggctgaatgacacatccactgtttcttattcactaccaattaacaacacacatatccaccacagacagaagagatcagtgagcattgaacggtttgtggagacattggtagtggcagacaaaatgatggtgggctaccatggccgcaaagacattgaacattacattttgagtgtgatgaatattgttgccaaactttaccgtgattccagcctaggaaacgttgtgaatattatagtggcccgcttaattgttctcacagaagatcagccaaacttggagataaaccaccatgcagacaagtccctcgatagcttctgtaaatggcagaaatccattctctcccaccaaagtgatggaaacaccattccagaaaatgggattgcccaccacgataatgcagttcttattactagatatgatatctgcacttataaaaataagccctgtggaacactgggcttggcctctgtggctggaatgtgtgagcctgaaaggagctgcagcattaatgaagacattggcctgggttcagcttttaccattgcacatgagattggtcacaattttggtatgaaccatgatggaattggaaattcttgtgggacgaaaggtcatgaagcagcaaaacttatggcagctcacattactgcgaataccaatcctttttcctggtctgcttgcagtcgagactacatcaccagctttctagaatttcttaaactcggtgattcaataagtggttcatga

SEQ ID NO: 53 - protein, 317 aa, Homo sapiens
MKTHGVIATEDEEYFIEPLKNTTEDSKHFSYENGHPHVIYKKSALQQRHLYDHSHCGVSDFTRSGKPWWLNDTSTVSYSLPINNTHIHHRQKRSVSIERFVETLVVADKMMVGYHGRKDIEHYILSVMNIVAKLYRDSSLGNVVNIIVARLIVLTEDQPNLEINHHADKSLDSFCKWQKSILSHQSDGNTIPENGIAHHDNAVLITRYDICTYKNKPCGTLGLASVAGMCEPERSCSINEDIGLGSAFTIAHEIGHNFGMNHDGIGNSCGTKGHEAAKLMAAHITANTNPFSWSACSRDYITSFLEFLKLGDSISGS

SEQ ID NO: 54 - DNA, 480 bp, Homo sapiens
  CDS (1)...(480)
atgaaaacgcatggtgttattgctacagaagatgaagagtattttatcgaacctttaaagaataccacagaggattccaagcattttagttatgaaaatggccaccctcatgttatttacaaaaagtctgcccttcaacaacgacatctgtatgatcactctcattgtggggtttcggatttcacaagaagtggcaaaccttggtggctgaatgacacatccactgtttcttattcactaccaattaacaacacacatatccaccacagacagaagagatcagtgagcattgaacggtttgtggagacattggtagtggcagacaaaatgatggtgggctaccatggccgcaaagacattgaacattacattttgagtgtgatgaatattgttgccaaactttaccgtgattccagcctaggaaacgttgtgaatattatagtggcccgcttaattgttctcacagaagatcagatatga

SEQ ID NO: 55 - protein, 159 aa, Homo sapiens
MKTHGVIATEDEEYFIEPLKNTTEDSKHFSYENGHPHVIYKKSALQQRHLYDHSHCGVSDFTRSGKPWWLNDTSTVSYSLPINNTHIHHRQKRSVSIERFVETLVVADKMMVGYHGRKDIEHYILSVMNIVAKLYRDSSLGNVVNIIVARLIVLTEDQI

SEQ ID NO: 56 - DNA, 1071 bp, Homo sapiens
  CDS (1)...(1071)
atgaaaacgcatggtgttattgctacagaagatgaagagtattttatcgaacctttaaagaataccacagaggattccaagcattttagttatgaaaatggccaccctcatgttatttacaaaaagtctgcccttcaacaacgacatctgtatgatcactctcattgtggggtttcggatttcacaagaagtggcaaaccttggtggctgaatgacacatccactgtttcttattcactaccaattaacaacacacatatccaccacagacagaagagatcagtgagcattgaacggtttgtggagacattggtagtggcagacaaaatgatggtgggctaccatggccgcaaagacattgaacattacattttgagtgtgatgaatattgttgccaaactttaccgtgattccagcctaggaaacgttgtgaatattatagtggcccgcttaattgttctcacagaagatcagccaaacttggagataaaccaccatgcagacaagtccctcgatagcttctgtaaatggcagaaatccattctctcccaccaaagtgatggaaacaccattccagaaaatgggattgcccaccacgataatgcagttcttattactagatatgatatctgcacttataaaaataagccctgtggaacactgggcttggcctctgtggctggaatgtgtgagcctgaaaggagctgcagcattaatgaagacattggcctgggttcagcttttaccattgcacatgagattggtcacaattttggtatgaaccatgatggaattggaaattcttgtgggacgaaaggtcatgaagcagcaaaacttatggcagctcacattactgcgaataccaatcctttttcctggtctgcttgcagtcgagactacatcaccagctttctagattcaggccgtggtacttgccttgataatgagcctcccaagcgtgactttctttatccagctgtggccccaggtcaggtgtatgatgctgatgagcaatgtcgtttccagtatggagcaacctcccgccaatgtaaatatggggtctttagataa

SEQ ID NO: 57 - protein, 356 aa, Homo sapiens
MKTHGVIATEDEEYFIEPLKNTTEDSKHFSYENGHPHVIYKKSALQQRHLYDHSHCGVSDFTRSGKPWWLNDTSTVSYSLPINNTHIHHRQKRSVSIERFVETLVVADKMMVGYHGRKDIEHYILSVMNIVAKLYRDSSLGNVVNIIVARLIVLTEDQPNLEINHHADKSLDSFCKWQKSILSHQSDGNTIPENGIAHHDNAVLITRYDICTYKNKPCGTLGLASVAGMCEPERSCSINEDIGLGSAFTIAHEIGHNFGMNHDGIGNSCGTKGHEAAKLMAAHITANTNPFSWSACSRDYITSFLDSGRGTCLDNEPPKRDFLYPAVAPGQVYDADEQCRFQYGATSRQCKYGVFR

SEQ ID NO: 58 - DNA, 1317 bp, Homo sapiens
  CDS (1)...(1317)
atgaaaacgcatggtgttattgctacagaagatgaagagtattttatcgaacctttaaagaataccacagaggattccaagcattttagttatgaaaatggccaccctcatgttatttacaaaaagtctgcccttcaacaacgacatctgtatgatcactctcattgtggggtttcggatttcacaagaagtggcaaaccttggtggctgaatgacacatccactgtttcttattcactaccaattaacaacacacatatccaccacagacagaagagatcagtgagcattgaacggtttgtggagacattggtagtggcagacaaaatgatggtgggctaccatggccgcaaagacattgaacattacattttgagtgtgatgaatattgttgccaaactttaccgtgattccagcctaggaaacgttgtgaatattatagtggcccgcttaattgttctcacagaagatcagccaaacttggagataaaccaccatgcagacaagtccctcgatagcttctgtaaatggcagaaatccattctctcccaccaaagtgatggaaacaccattccagaaaatgggattgcccaccacgataatgcagttcttattactagatatgatatctgcacttataaaaataagccctgtggaacactgggcttggcctctgtggctggaatgtgtgagcctgaaaggagctgcagcattaatgaagacattggcctgggttcagcttttaccattgcacatgagattggtcacaattttggtatgaaccatgatggaattggaaattcttgtgggacgaaaggtcatgaagcagcaaaacttatggcagctcacattactgcgaataccaatcctttttcctggtctgcttgcagtcgagactacatcaccagctttctagattcaggccgtggtacttgccttgataatgagcctcccaagcgtgactttctttatccagctgtggccccaggtcaggtgtatgatgctgatgagcaatgtcgtttccagtatggagcaacctcccgccaatgtaaatatggggaagtgtgtagagagctctggtgtctcagcaaaagcaaccgctgtgtcaccaacagtattccagcagctgaggggacactgtgtcaaactgggaatattgaaaaagggtggtgttatcagggagattgtgttccttttggcacttggccccagagcatagatgggggctggggtccctggtcactatggggagagtgcagcaggacctgcgggggaggcgtctcctcatccctaagacactgtgacagtccagcgtaa

SEQ ID NO: 59 - protein, 438 aa, Homo sapiens
MKTHGVIATEDEEYFIEPLKNTTEDSKHFSYENGHPHVIYKKSALQQRHLYDHSHCGVSDFTRSGKPWWLNDTSTVSYSLPINNTHIHHRQKRSVSIERFVETLVVADKMMVGYHGRKDIEHYILSVMNIVAKLYRDSSLGNVVNIIVARLIVLTEDQPNLEINHHADKSLDSFCKWQKSILSHQSDGNTIPENGIAHHDNAVLITRYDICTYKNKPCGTLGLASVAGMCEPERSCSINEDIGLGSAFTIAHEIGHNFGMNHDGIGNSCGTKGHEAAKLMAAHITANTNPFSWSACSRDYITSFLDSGRGTCLDNEPPKRDFLYPAVAPGQVYDADEQCRFQYGATSRQCKYGEVCRELWCLSKSNRCVTNSIPAAEGTLCQTGNIEKGWCYQGDCVPFGTWPQSIDGGWGPWSLWGECSRTCGGGVSSSLRHCDSPA

SEQ ID NO: 60 - DNA, 2274 bp, Homo sapiens
  CDS (1)...(2274)
atgaaaacgcatggtgttattgctacagaagatgaagagtattttatcgaacctttaaagaataccacagaggattccaagcattttagttatgaaaatggccaccctcatgttatttacaaaaagtctgcccttcaacaacgacatctgtatgatcactctcattgtggggtttcggatttcacaagaagtggcaaaccttggtggctgaatgacacatccactgtttcttattcactaccaattaacaacacacatatccaccacagacagaagagatcagtgagcattgaacggtttgtggagacattggtagtggcagacaaaatgatggtgggctaccatggccgcaaagacattgaacattacattttgagtgtgatgaatattgttgccaaactttaccgtgattccagcctaggaaacgttgtgaatattatagtggcccgcttaattgttctcacagaagatcagccaaacttggagataaaccaccatgcagacaagtccctcgatagcttctgtaaatggcagaaatccattctctcccaccaaagtgatggaaacaccattccagaaaatgggattgcccaccacgataatgcagttcttattactagatatgatatctgcacttataaaaataagccctgtggaacactgggcttggcctctgtggctggaatgtgtgagcctgaaaggagctgcagcattaatgaagacattggcctgggttcagcttttaccattgcacatgagattggtcacaattttggtatgaaccatgatggaattggaaattcttgtgggacgaaaggtcatgaagcagcaaaacttatggcagctcacattactgcgaataccaatcctttttcctggtctgcttgcagtcgagactacatcaccagctttctagattcaggccgtggtacttgccttgataatgagcctcccaagcgtgactttctttatccagctgtggccccaggtcaggtgtatgatgctgatgagcaatgtcgtttccagtatggagcaacctcccgccaatgtaaatatggggaagtgtgtagagagctctggtgtctcagcaaaagcaaccgctgtgtcaccaacagtattccagcagctgaggggacactgtgtcaaactgggaatattgaaaaagggtggtgttatcagggagattgtgttccttttggcacttggccccagagcatagatgggggctggggtccctggtcactatggggagagtgcagcaggacctgcgggggaggcgtctcctcatccctaagacactgtgacagtccagcaccttcaggaggtggaaaatattgccttggggaaaggaaacggtatcgctcctgtaacacagatccatgccctttgggttcccgagattttcgagagaaacagtgtgcagactttgacaatatgcctttccgaggaaagtattataactggaaaccctatactggaggtggggtaaaaccttgtgcattaaactgcttggctgaaggttataatttctacactgaacgtgctcctgcggtgatcgatgggacccagtgcaatgcggattcactggatatctgcatcaatggagaatgcaagcacgtaggctgtgataatattttgggatctgatgctagggaagatagatgtcgagtctgtggaggggacggaagcacatgtgatgccattgaagggttcttcaatgattcactgcccaggggaggctacatggaagtggtgcagataccaagaggctctgttcacattgaagttagagaagttgccatgtcaaagaactatattgctttaaaatctgaaggagatgattactatattaatggtgcctggactattgactggcctaggaaatttgatgttgctgggacagcttttcattacaagagaccaactgatgaaccagaatccttggaagctctaggtcctacctcagaaaatctcatcgtcatggttctgcttcaagaacagaatttgggaattaggtataagttcaatgttcccatcactcgaactggcagtggagataatgaagttggctttacatggaatcatcagccttggtcagaatgctcagctacttgtgctggaggtaagatgcccactaggcagcccacccagagggcaagatggagaacaaaacacattctgagctatgctttgtgtttgttaaaaaagctaattggaaacatttcttgcaggtttgcttcaagctgtaatttagcaaaagaaactttgctttaa

SEQ ID NO: 61 - protein, 757 aa, Homo sapiens
MKTHGVIATEDEEYFIEPLKNTTEDSKHFSYENGHPHVIYKKSALQQRHLYDHSHCGVSDFTRSGKPWWLNDTSTVSYSLPINNTHIHHRQKRSVSIERFVETLVVADKMMVGYHGRKDIEHYILSVMNIVAKLYRDSSLGNVVNIIVARLIVLTEDQPNLEINHHADKSLDSFCKWQKSILSHQSDGNTIPENGIAHHDNAVLITRYDICTYKNKPCGTLGLASVAGMCEPERSCSINEDIGLGSAFTIAHEIGHNFGMNHDGIGNSCGTKGHEAAKLMAAHITANTNPFSWSACSRDYITSFLDSGRGTCLDNEPPKRDFLYPAVAPGQVYDADEQCRFQYGATSRQCKYGEVCRELWCLSKSNRCVTNSIPAAEGTLCQTGNIEKGWCYQGDCVPFGTWPQSIDGGWGPWSLWGECSRTCGGGVSSSLRHCDSPAPSGGGKYCLGERKRYRSCNTDPCPLGSRDFREKQCADFDNMPFRGKYYNWKPYTGGGVKPCALNCLAEGYNFYTERAPAVIDGTQCNADSLDICINGECKHVGCDNILGSDAREDRCRVCGGDGSTCDAIEGFFNDSLPRGGYMEVVQIPRGSVHIEVREVAMSKNYIALKSEGDDYYINGAWTIDWPRKFDVAGTAFHYKRPTDEPESLEALGPTSENLIVMVLLQEQNLGIRYKFNVPITRTGSGDNEVGFTWNHQPWSECSATCAGGKMPTRQPTQRARWRTKHILSYALCLLKKLIGNISCRFASSCNLAKETLL

SEQ ID NO: 62 - DNA, 3160 bp, Homo sapiens
aatcatccagttttctaaattatggaaattttgtggaagacgttgacctggattttgagcctcatcatggcttcatcggaatttcatagtgaccacaggctttcatacagttctcaagaggaattcctgacttatcttgaacactaccagctaactattccaataagggttgatcaaaatggagcatttctcagctttactgtgaaaaatgataaacactcaaggagaagacggagtatggaccctattgatccacagcaggcagtatctaagttattttttaaactttcagcctatggcaagcactttcatctaaacttgactctcaacacagattttgtgtccaaacattttacagtagaatattgggggaaagatggaccccagtggaaacatgattttttagacaactgtcattacacaggatatttgcaagatcaacgtagtacaactaaagtggctttaagcaactgtgttgggttggaaaagctgccaaaattttctcctgctgcaattcaagttggctgggggccgaatttgaagatgaaaacgcatggtgttattgctacagaagatgaagagtattttatcgaacctttaaagaataccacagaggattccaagcattttagttatgaaaatggccaccctcatgttatttacaaaaagtctgcccttcaacaacgacatctgtatgatcactctcattgtggggtttcggatttcacaagaagtggcaaaccttggtggctgaatgacacatccactgtttcttattcactaccaattaacaacacacatatccaccacagacagaagagatcagtgagcattgaacggtttgtggagacattggtagtggcagacaaaatgatggtgggctaccatggccgcaaagacattgaacattacattttgagtgtgatgaatattgtcaggttgccaaactttaccgtgattccagcctaggaaacgttgtgaatattatagtggcccgcttaattgttctcacagaagatcagccaaacttggagataaaccaccatgcagacaagtccctcgatagcttctgtaaatggcagaaatccattctctcccaccaaagtgatggaaacaccattccagaaaatgggattgcccaccacgataatgcagttcttattactagatatgatatctgcacttataaaaataagccctgtggaacactgggcttggcctctgtggctggaatgtgtgagcctgaaaggagctgcagcattaatgaagacattggcctgggttcagcttttaccattgcacatgagattggtcacaattttggtatgaaccatgatggaattggaaattcttgtgggacgaaaggtcatgaagcagcaaaacttatggcagctcacattactgcgaataccaatcctttttcctggtctgcttgcagtcgagactacatcaccagctttctagaatttcttaaactcggtgattcaataagtggttcatgaatcgcccagaagccgtcctgattaaataataaagaacccatttccgttaaaatggacgtgttatgccagcttctgatgttttccggcgacggctttgcagttcaggccgtggtacttgccttgataatgagcctcccaagcgtgactttctttatccagctgtggccccaggtcaggtgtatgatgctgatgagcaatgtcgtttccagtatggagcaacctcccgccaatgtaaatatggggtctttagataataactctttcaaccaactgccaatcagaaaatcttctactccatctatgacctggaactccccaccccttaaaatgtataaaaccaagctgtagcctgaccaccttgggcatatgttcttaggatctcaagtgtgtagagagctctggtgtctcagcaaaagcaaccgctgtgtcaccaacagtattccagcagctgaggggacactgtgtcaaactgggaatattgaaaaagggtggtgttatcagggagattgtgttccttttggcacttggccccagagcatagatgggggctggggtccctggtcactatggggagagtgcagcaggacctgcgggggaggcgtctcctcatccctaagacactgtgacagtccagcacgtaagtagctaaaaccttcaggaggtggaaaatattgccttggggaaaggaaacggtatcgctcctgtaacacagatccatgccctttgggttcccgagattttcgagagaaacagtgtgcagactttgacaatatgcctttccgaggaaagtattataactggaaaccctatactggaggtggggtaaaaccttgtgcattaaactgcttggctgaaggttataatttctacactgaacgtgctcctgcggtgatcgatgggacccagtgcaatgcggattcactggatatctgcatcaatggagaatgcaagcacgtaggctgtgataatattttgggatctgatgctagggaagatagatgtcgagtctgtggaggggacggaagcacatgtgatgccattgaagggttcttcaatgattcactgcccaggggaggctacatggaagtggtgcagataccaagaggctctgttcacattgaagttagagaagttgccatgtcaaagaactatattgctttaaaatctgaaggagatgattactatattaatggtgcctggactattgactggcctaggaaatttgatgttgctgggacagcttttcattacaagagaccaactgatgaaccagaatccttggaagctctaggtcctacctcagaaaatctcatcgtcatggttctgcttcaagaacagaatttgggaattaggtataagttcaatgttcccatcactcgaactggcagtggagataatgaagttggctttacatggaatcatcagccttggtcagaatgctcagctacttgtgctggaggtaagatgcccactaggcagcccacccagagggcaagatggagaacaaaacacattctgagctatgctttgtgtttgttaaaaaagctaattggaaacatttcttgcaggtttgcttcaagctgtaatttagcaaaagaaactttgctttaattatattatattccatttgttttcaacctcatgtaatttgtgcagat

SEQ ID NO: 63 - DNA, 921 bp, Homo sapiens
  CDS (1)...(921)
atgagtctcaaaatgcttataagcaggaacaagctgattttactactaggaatagtcttttttgaacraggtaaatctgcarctctttcgctccccaaagctcccagttgtgggcagagtctggttaaggtacagccttggaattattttaacattttcagtcgcattcttggaggaagccaagtggagaagggttcctatccctggcaggtatctctgaaacaaaggcagaagcatatttgtggaggaagcatcgtctcaccacagtgggtgatcacggcggctcactgcattgcaaacagaaacattgtgtctactttgaatgttactgctggagagtatgacttaagccagacagacccaggagagcaaactctcactattgaaactgtcatcatacatccacatttctccaccaagaaaccaatggactatgatattgcccttttgaagatggctggagccttccaatttggccactttgtggggcccatatgtcttccagagctgcgggagcaatttgaggctggttttatttgtacaactgcaggctggggccgcttaactgaaggtggcgtcctctcacaagtcttgcaggaagtgaatctgcctattttgacctgggaagagtgtgtggcagctctgttaacactaaagaggcccatcagtgggaagacctttctttgcacaggttttcctgatggagggagagacgcatgtcagggagattcaggaggttcactcatgtgccggaataagaaaggggcctggactctggctggtgtgacttcctggggtttgggctgtggtcgaggctggagaaacaatgtgaggaaaagtgatcaaggatcccctgggatcttcacagacattagtaaagtgctttcctggatccacgaacacatccaaactggtaactaa

SEQ ID NO: 64 - protein, 306 aa, Homo sapiens
  VARIANT (1)...(306): Xaa = Any Amino Acid
MSLKMLISRNKLILLLGIVFFEXGKSAXLSLPKAPSCGQSLVKVQPWNYFNIFSRILGGSQVEKGSYPWQVSLKQRQKHICGGSIVSPQWVITAAHCIANRNIVSTLNVTAGEYDLSQTDPGEQTLTIETVIIHPHFSTKKPMDYDIALLKMAGAFQFGHFVGPICLPELREQFEAGFICTTAGWGRLTEGGVLSQVLQEVNLPILTWEECVAALLTLKRPISGKTFLCTGFPDGGRDACQGDSGGSLMCRNKKGAWTLAGVTSWGLGCGRGWRNNVRKSDQGSPGIFTDISKVLSWIHEHIQTGN

SEQ ID NO: 65 - DNA, 909 bp, Homo sapiens
  CDS (1)...(909)
atgcttataagcaggaacaagctgattttactactaggaatagtcttttttgaacraggtaaatctgcarctctttcgctccccaaagctcccagttgtgggcagagtctggttaaggtacagccttggaattattttaacattttcagtcgcattcttggaggaagccaagtggagaagggttcctatccctggcaggtatctctgaaacaaaggcagaagcatatttgtggaggaagcatcgtctcaccacagtgggtgatcacggcggctcactgcattgcaaacagaaacattgtgtctactttgaatgttactgctggagagtatgacttaagccagacagacccaggagagcaaactctcactattgaaactgtcatcatacatccacatttctccaccaagaaaccaatggactatgatattgcccttttgaagatggctggagccttccaatttggccactttgtggggcccatatgtcttccagagctgcgggagcaatttgaggctggttttatttgtacaactgcaggctggggccgcttaactgaaggtggcgtcctctcacaagtcttgcaggaagtgaatctgcctattttgacctgggaagagtgtgtggcagctctgttaacactaaagaggcccatcagtgggaagacctttctttgcacaggttttcctgatggagggagagacgcatgtcagggagattcaggaggttcactcatgtgccggaataagaaaggggcctggactctggctggtgtgacttcctggggtttgggctgtggtcgaggctggagaaacaatgtgaggaaaagtgatcaaggatcccctgggatcttcacagacattagtaaagtgctttcctggatccacgaacacatccaaactggtaactaa

SEQ ID NO: 66 - protein, 302 aa, Homo sapiens
  VARIANT (1)...(302): Xaa = Any Amino Acid
MLISRNKLILLLGIVFFEXGKSAXLSLPKAPSCGQSLVKVQPWNYFNIFSRILGGSQVEKGSYPWQVSLKQRQKHICGGSIVSPQWVITAAHCIANRNIVSTLNVTAGEYDLSQTDPGEQTLTIETVIIHPHFSTKKPMDYDIALLKMAGAFQFGHFVGPICLPELREQFEAGFICTTAGWGRLTEGGVLSQVLQEVNLPILTWEECVAALLTLKRPISGKTFLCTGFPDGGRDACQGDSGGSLMCRNKKGAWTLAGVTSWGLGCGRGWRNNVRKSDQGSPGIFTDISKVLSWIHEHIQTGN

SEQ ID NO: 67 - DNA, 495 bp, Homo sapiens
  CDS (1)...(495)
atggactatgatattgcccttttgaagatggctggagccttccaatttggccactttgtggggcccatatgtcttccagagctgcgggagcaatttgaggctggttttatttgtacaactgcaggctggggccgcttaactgaaggtggcgtcctctcacaagtcttgcaggaagtgaatctgcctattttgacctgggaagagtgtgtggcagctctgttaacactaaagaggcccatcagtgggaagacctttctttgcacaggttttcctgatggagggagagacgcatgtcagggagattcaggaggttcactcatgtgccggaataagaaaggggcctggactctggctggtgtgacttcctggggtttgggctgtggtcgaggctggagaaacaatgtgaggaaaagtgatcaaggatcccctgggatcttcacagacattagtaaagtgctttcctggatccacgaacacatccaaactggtaactaa

SEQ ID NO: 68 - protein, 164 aa, Homo sapiens
MDYDIALLKMAGAFQFGHFVGPICLPELREQFEAGFICTTAGWGRLTEGGVLSQVLQEVNLPILTWEECVAALLTLKRPISGKTFLCTGFPDGGRDACQGDSGGSLMCRNKKGAWTLAGVTSWGLGCGRGWRNNVRKSDQGSPGIFTDISKVLSWIHEHIQTGN

SEQ ID NO: 69 - DNA, 1568 bp, Homo sapiens
catacaccatagtctcagactcagtttcatgggtgaaatggagaagatattacctcaatcctagaagctatctaatcatttagtttgtctcgtttttttctctggttcaaagtttttttcttccatttcaggtgtcgtgaaaagcttgaattcggcgcgccagatatcacacgtgccaagggactggctcaaaggcttcctatttttgtttgctttagtctctctaaaatttcagggaaaaactatgagtctcaaaatgcttataagcaggaacaagctgattttactactaggaatagtcttttttgaacraggtaaatctgcarctctttcgctccccaaagctcccagttgtgggcagagtctggttaaggtacagccttggaattattttaacattttcagtcgcattcttggaggaagccaagtggagaagggttcctatccctggcaggtatctctgaaacaaaggcagaagcatatttgtggaggaagcatcgtctcaccacagtgggtgatcacggcggctcactgcattgcaaacagaaacattgtgtctactttgaatgttactgctggagagtatgacttaagccagacagacccaggagagcaaactctcactattgaaactgtcatcatacatccacatttctccaccaagaaaccaatggactatgatattgcccttttgaagatggctggagccttccaatttggccactttgtggggcccatatgtcttccagagctgcgggagcaatttgaggctggttttatttgtacaactgcaggctggggccgcttaactgaaggtggcgtcctctcacaagtcttgcaggaagtgaatctgcctattttgacctgggaagagtgtgtggcagctctgttaacactaaagaggcccatcagtgggaagacctttctttgcacaggttttcctgatggagggagagacgcatgtcagggagattcaggaggttcactcatgtgccggaataagaaaggggcctggactctggctggtgtgacttcctggggtttgggctgtggtcgaggctggagaaacaatgtgaggaaaagtgatcaaggatcccctgggatcttcacagacattagtaaagtgctttcctggatccacgaacacatccaaactggtaactaagccatcacacaaggttaagaagctgccattctgctagggccagagacagcatcagcagagtcctggcaaatcagagcacctgaaccaacagtctctacctctgttctcagtgtagcacacaaggattgtgaggtttaccaagtctaaataaaacaagagtaaaatatggtaaaaaaaaaaaaaaaaaaaaaatgtggagcagcatgcagatattcaatgaaaaatgaatccatccatcctagaccttctcaaactggcctttaattgaaactatctcaattgatgatatgctttcaccacttacttctctggattcagagtccagagtgctcaccattacaccgatggcaccacttacttctcaaaaaaatccagcaaactataaccagatcagtagttatca

SEQ ID NO: 70 - DNA, 654 bp, Homo sapiens
  CDS (1)...(654)
atgtggacagctgtgattggaactaataatatacatggacgctatcctcataccaagaagataaaaattaaagcaatcattattcatccaaacttcattttggaatcttatgtaaatgatattgcactttttcacttaaaaaaagcagtgaggtataatgactatattcagcctatttgcctaccttttgatgttttccaaatcctggacggaaacacaaagtgttttataagtggctggggaagaacaaaagaagaaggtaacgctacaaatattttacaagatgcagaagtgcattatatttctcgagagatgtgtaattctgagaggagttatgggggaataattcctaacacttcattttgtgcaggtgatgaagatggagcttttgatacttgcaggggtgacagtgggggaccattaatgtgctacttaccagaatataaaagattttttgtaatgggaattaccagttacggacatggctgtggtcgaagaggttttcctggtgtctatattgggccatccttctaccaaaagtggctgacagagcatttcttccatgcaagcactcaaggcatacttactataaatattttacgtggccagatcctcatagctttatgttttgtcatcttactagcaacaacataa

SEQ ID NO: 71 - protein, 217 aa, Homo sapiens
MWTAVIGTNNIHGRYPHTKKIKIKAIIIHPNFILESYVNDIALFHLKKAVRYNDYIQPICLPFDVFQILDGNTKCFISGWGRTKEEGNATNILQDAEVHYISREMCNSERSYGGIIPNTSFCAGDEDGAFDTCRGDSGGPLMCYLPEYKRFFVMGITSYGHGCGRRGFPGVYIGPSFYQKWLTEHFFHASTQGILTINILRGQILIALCFVILLATT

SEQ ID NO: 72 - DNA, 1047 bp, Homo sapiens
  CDS (1)...(1047)
atgcggctggggctcctgagcgtggcgytgttgtttgtggggagctctcacttayactcagaccactactcgccctctggaaggcacaggctcggcccctcgccggaaccggcggctagttcccagcaggctgaggccgtccgcaagaggctccggcggcggagggagggaggggcgcatgcaaaggattgtggaacagcaccgcttaaggatgtgttgcaagggtctcggattatagggggcaccgaagcacaagctggcgcatggccgtgggtggtgagcctgcagattaaatatggccgtgttcttgttcatgtatgtgggggaaccctagtgagagagaggtgggtcctcacagctgcccactgcactaaagacrctagcgatcctttaatgtggacagctgtgattggaactaataatatacatggacgctatcctcataccaagaagataaaaattaaagcaatcattattcatccaaacttcattttggaatcttatgtaaatgatattgcactttttcacttaaaaaaagcagtgaggtataatgactatattcagcctatttgcctaccttttgatgttttccaaatcctggacggaaacacaaagtgttttataagtggctggggaagaacaaaagaagaaggtaacgctacaaatattttacaagatgcagaagtgcattatatttctcgagagatgtgtaattctgagaggagttatgggggaataattcctaacacttcattttgtgcaggtgatgaagatggagcttttgatacttgcaggggtgacagtgggggaccattaatgtgctacttaccagaatataaaagattttttgtaatgggaattaccagttacggacatggctgtggtcgaagaggttttcctggtgtctatattgggccatccttctaccaaaagtggctgacagagcatttcttccatgcaagcactcaaggcatacttactataaatattttacgtggccagatcctcatagctttatgttttgtcatcttactagcaacaacataa

SEQ ID NO: 73 - protein, 348 aa, Homo sapiens
  VARIANT (1)...(348): Xaa = Any Amino Acid
MRLGLLSVAXLFVGSSHLXSDHYSPSGRHRLGPSPEPAASSQQAEAVRKRLRRRREGGAHAKDCGTAPLKDVLQGSRIIGGTEAQAGAWPWVVSLQIKYGRVLVHVCGGTLVRERWVLTAAHCTKDXSDPLMWTAVIGTNNIHGRYPHTKKIKIKAIIIHPNFILESYVNDIALFHLKKAVRYNDYIQPICLPFDVFQILDGNTKCFISGWGRTKEEGNATNILQDAEVHYISREMCNSERSYGGIIPNTSFCAGDEDGAFDTCRGDSGGPLMCYLPEYKRFFVMGITSYGHGCGRRGFPGVYIGPSFYQKWLTEHFFHASTQGILTINILRGQILIALCFVILLATT

SEQ ID NO: 74 - DNA, 867 bp, Homo sapiens
  CDS (1)...(867)
atgcaaaattgtggaacagcaccgcttaaggatgtgttgcaagggtctcggattatagggggcaccgaagcacaagctggcgcatggccgtgggtggtgagcctgcagattaaatatggccgtgttcttgttcatgtatgtgggggaaccctagtgagagagaggtgggtcctcacagctgcccactgcactaaagacrctagcgatcctttaatgtggacagctgtgattggaactaataatatacatggacgctatcctcataccaagaagataaaaattaaagcaatcattattcatccaaacttcattttggaatcttatgtaaatgatattgcactttttcacttaaaaaaagcagtgaggtataatgactatattcagcctatttgcctaccttttgatgttttccaaatcctggacggaaacacaaagtgttttataagtggctggggaagaacaaaagaagaaggtaacgctacaaatattttacaagatgcagaagtgcattatatttctcgagagatgtgtaattctgagaggagttatgggggaataattcctaacacttcattttgtgcaggtgatgaagatggagcttttgatacttgcaggggtgacagtgggggaccattaatgtgctacttaccagaatataaaagattttttgtaatgggaattaccagttacggacatggctgtggtcgaagaggttttcctggtgtctatattgggccatccttctaccaaaagtggctgacagagcatttcttccatgcaagcactcaaggcatacttactataaatattttacgtggccagatcctcatagctttatgttttgtcatcttactagcaacaacataa

SEQ ID NO: 75 - protein, 288 aa, Homo sapiens
  VARIANT (1)...(288): Xaa = Any Amino Acid
MQNCGTAPLKDVLQGSRIIGGTEAQAGAWPWVVSLQIKYGRVLVHVCGGTLVRERWVLTAAHCTKDXSDPLMWTAVIGTNNIHGRYPHTKKIKIKAIIIHPNFILESYVNDIALFHLKKAVRYNDYIQPICLPFDVFQILDGNTKCFISGWGRTKEEGNATNILQDAEVHYISREMCNSERSYGGIIPNTSFCAGDEDGAFDTCRGDSGGPLMCYLPEYKRFFVMGITSYGHGCGRRGFPGVYIGPSFYQKWLTEHFFHASTQGILTINILRGQILIALCFVILLATT

SEQ ID NO: 76 - DNA, 1286 bp, Homo sapiens
ttcttccatttcaggtgtcgtgaaaagcttgaattcggcgcgccagatatcacacgtgccaaggggctggctcgccgccatcttgctcaccagcctccaaaatgcggctggggctcctgagcgtggcgctgttgtttgtggggagctctcacttatactcagaccactactcgccctctggaaggcacaggctcggcccctcgccggaaccggcggctagttcccagcaggctgaggccgtccgcaagaggctccggcggcggagggagggaggggcgcatgcaaaggattgtggaacagcaccgcttaaggatgtgttgcaagggtctcggattatagggggcaccgaagcacaagctggcgcatggccgtgggtggtgagcctgcagattaaatatggccgtgttcttgttcatgtatgtgggggaaccctagtgagagagaggtgggtcctcacagctgcccactgcactaaagacgctagcgatcctttaatgtggacagctgtgattggaactaataatatacatggacgctatcctcataccaagaagataaaaattaaagcaatcattattcatccaaacttcattttggaatcttatgtaaatgatattgcactttttcacttaaaaaaagcagtgaggtataatgactatattcagcctatttgcctaccttttgatgttttccaaatcctggacggaaacacaaagtgttttataagtggctggggaagaacaaaagaagaaggtaacgctacaaatattttacaagatgcagaagtgcattatatttctcgagagatgtgtaattctgagaggagttatgggggaataattcctaacacttcattttgtgcaggtgatgaagatggagcttttgatacttgcaggggtgacagtgggggaccattaatgtgctacttaccagaatataaaagattttttgtaatgggaattaccagttacggacatggctgtggtcgaagaggttttcctggtgtctatattgggccatccttctaccaaaagtggctgacagagcatttcttccatgcaagcactcaaggcatacttactataaatattttacgtggccagatcctcatagctttatgttttgtcatcttactagcaacaacataaagaaattctgaaggctttcatatctttattttgcattgtgtccctttctatgttctatataatgaacatcatttattcttctagcaattaattgcctacattagagatttcatgtgaacattttatgggctataaata

SEQ ID NO: 77 - DNA, 1524 bp, Homo sapiens
  CDS (1)...(1524)
atgccttggctgctctcagcccccaagctggttcccgctgtagcaaacgtccgcggcctctcaggatgtatgttgtgttcacagcgaaggtactcccttcagcctgtcccagaaaggaggattccaaaccgatacttaggccagcccagcccctttacacacccacacctcctcagaccaggggaggtaactccaggactatctcaggtggaatatgcacttcgcagacacaaactaatgtctctgatccagaaggaagctcaagggcagagtgggacagaccagacagtggttgtgctctccaaccctacatactacatgagcaacgatattccctatactttccaccaagacaacaatttcctgtacctatgtggattccaagagcctgatagcattcttgtccttcagagcctccctggcaaacaattaccatcacacaaagccatactttttgtgcctcggcgagatcccagtcgagaactttgggatggtccgcgatctggcactgatggagcaatagctctaactggagtagacgaagcctatacgctagaagaatttcaacatcttctaccaaaaatgaaagctgagacgaacatggtttggtatgactggatgaggccctcacatgcacagcttcactctgactatatgcagcccctgactgaggccaaagccaagagcaagaacaaggttcggggtgttcagcagctgatacagcgcctccggctgatcaagtctcctgcagaaattgaacgaatgcagattgctgggaagctgacatcacaggctttcatagaaaccatgttcaccagtaaagcccctgtggaagaagcctttctttatgctaagtttgaatttgaatgccgggctcgtggcgcagacattttagcctatccacctgtggtggctggtggtaatcggtcaaacactttgcactatgtgaaaaataatcaactcatcaaggatggggaaatggtgcttctggatggaggttgtgagtcttcctgctatgtgagtgacatcacacgtacgtggccagtcaatggcaggttcaccgcacctcaggcagaactctatgaagccgttctagagatccaaagagattgtttggccctctgcttccctgggacaagcttggagaacatctacagcatgatgctgaccctgataggacagaagcttaaagacttggggatcatgaagaacattaaggaaaataatgccttcaaggctgctcgaaaatactgtcctcatcatgttggccactacctcgggatggatgtccatgacactccagacatgccccgttccctccctctgcagcctgggatggtaatcacaattgagcccggcatttatattccagaggatgacaaagatgccccagagaagtttcggggtcttggtgtacgaattgaggatgatgtagtggtgactcaggactcacctctcatcctttctgcagactgtcccaaagagatgaatgacattgaacagatatgcagccaggcttcttga

SEQ ID NO: 78 - protein, 507 aa, Homo sapiens
MPWLLSAPKLVPAVANVRGLSGCMLCSQRRYSLQPVPERRIPNRYLGQPSPFTHPHLLRPGEVTPGLSQVEYALRRHKLMSLIQKEAQGQSGTDQTVVVLSNPTYYMSNDIPYTFHQDNNFLYLCGFQEPDSILVLQSLPGKQLPSHKAILFVPRRDPSRELWDGPRSGTDGAIALTGVDEAYTLEEFQHLLPKMKAETNMVWYDWMRPSHAQLHSDYMQPLTEAKAKSKNKVRGVQQLIQRLRLIKSPAEIERMQIAGKLTSQAFIETMFTSKAPVEEAFLYAKFEFECRARGADILAYPPVVAGGNRSNTLHYVKNNQLIKDGEMVLLDGGCESSCYVSDITRTWPVNGRFTAPQAELYEAVLEIQRDCLALCFPGTSLENIYSMMLTLIGQKLKDLGIMKNIKENNAFKAARKYCPHHVGHYLGMDVHDTPDMPRSLPLQPGMVITIEPGIYIPEDDKDAPEKFRGLGVRIEDDVVVTQDSPLILSADCPKEMNDIEQICSQAS

SEQ ID NO: 79 - DNA, 210 bp, Homo sapiens
  CDS (1)...(210)
atgccttggctgctctcagcccccaagctggttcccgctgtagcaaacgtccgcggcctctcaggatgtatgttgtgttcacagcgaaggtactcccttcagcctgtcccagaaaggaggattccaaaccgatacttaggccagcccagcccctttacacacccacacctcctcagaccagactcgaattcctgctgggaagtcggctga

SEQ ID NO: 80 - protein, 69 aa, Homo sapiens
MPWLLSAPKLVPAVANVRGLSGCMLCSQRRYSLQPVPERRIPNRYLGQPSPFTHPHLLRPDSNSCWEVG

SEQ ID NO: 81 - DNA, 873 bp, Homo sapiens
  CDS (1)...(873)
atgccttggctgctctcagcccccaagctggttcccgctgtagcaaacgtccgcggcctctcaggatgtatgttgtgttcacagcgaaggtactcccttcagcctgtcccagaaaggaggattccaaaccgatacttaggccagcccagcccctttacacacccacacctcctcagaccaggggaggtaactccaggactatctcaggtggaatatgcacttcgcagacacaaactaatgtctctgatccagaaggaagctcaagggcagagtgggacagaccagacagtggttgtgctctccaaccctacatactacatgagcaacgatattccctatactttccaccaagacaacaatttcctgtacctatgtggattccaagagcctgatagcattcttgtccttcagagcctccctggcaaacaattaccatcacacaaagccatactttttgtgcctcggcgagatcccagtcgagaactttgggatggtccgcgatctggcactgatggagcaatagctctaactggagtagacgaagcctatacgctagaagaatttcaacatcttctaccaaaaatgaaagtgctcttgccagctcttcaaaaggaggtactgttctccaagaacgatccatgcatcacagcatcagaatcacctgctgagacgaacatggtttggtatgactggatgaggccctcacatgcacagcttcactctgactatatgcagcccctgactgaggccaaagccaagagcaagaacaaggttcggggtgttcagcagctgatacagcgcctccggctgatcaagtctcctgcagaaattgaacgaatgcagattgctgggaagctgacatcacaggtatga

SEQ ID NO: 82 - protein, 290 aa, Homo sapiens
MPWLLSAPKLVPAVANVRGLSGCMLCSQRRYSLQPVPERRIPNRYLGQPSPFTHPHLLRPGEVTPGLSQVEYALRRHKLMSLIQKEAQGQSGTDQTVVVLSNPTYYMSNDIPYTFHQDNNFLYLCGFQEPDSILVLQSLPGKQLPSHKAILFVPRRDPSRELWDGPRSGTDGAIALTGVDEAYTLEEFQHLLPKMKVLLPALQKEVLFSKNDPCITASESPAETNMVWYDWMRPSHAQLHSDYMQPLTEAKAKSKNKVRGVQQLIQRLRLIKSPAEIERMQIAGKLTSQV

SEQ ID NO: 83 - DNA, 798 bp, Homo sapiens
  CDS (1)...(798)
atgccttggctgctctcagcccccaagctggttcccgctgtagcaaacgtccgcggcctctcaggatgtatgttgtgttcacagcgaaggtactcccttcagcctgtcccagaaaggaggattccaaaccgatacttaggccagcccagcccctttacacacccacacctcctcagaccaggggaggtaactccaggactatctcaggtggaatatgcacttcgcagacacaaactaatgtctctgatccagaaggaagctcaagggcagagtgggacagaccagacagtggttgtgctctccaaccctacatactacatgagcaacgatattccctatactttccaccaagacaacaatttcctgtacctatgtggattccaagagcctgatagcattcttgtccttcagagcctccctggcaaacaattaccatcacacaaagccatactttttgtgcctcggcgagatcccagtcgagaactttgggatggtccgcgatctggcactgatggagcaatagctctaactggagtagacgaagcctatacgctagaagaatttcaacatcttctaccaaaaatgaaagctgagacgaacatggtttggtatgactggatgaggccctcacatgcacagcttcactctgactatatgcagcccctgactgaggccaaagccaagagcaagaacaaggttcggggtgttcagcagctgatacagcgcctccggctgatcaagtctcctgcagaaattgaacgaatgcagattgctgggaagctgacatcacaggtatga

SEQ ID NO: 84 - protein, 265 aa, Homo sapiens [sequence omitted]

SEQ ID NO: 85 - DNA, 636 bp, Homo sapiens
  CDS (1)...(636)
atgtctctgatccagaaggaagctcaagggcagagtgggacagaccagacagtggttgtgctctccaaccctacatactacatgagcaacgatattccctatactttccaccaagacaacaatttcctgtacctatgtggattccaagagcctgatagcattcttgtccttcagagcctccctggcaaacaattaccatcacacaaagccatactttttgtgcctcggcgagatcccagtcgagaactttgggatggtccgcgatctggcactgatggagcaatagctctaactggagtagacgaagcctatacgctagaagaatttcaacatcttctaccaaaaatgaaagtgctcttgccagctcttcaaaaggaggtactgttctccaagaacgatccatgcatcacagcatcagaatcacctgctgagacgaacatggtttggtatgactggatgaggccctcacatgcacagcttcactctgactatatgcagcccctgactgaggccaaagccaagagcaagaacaaggttcggggtgttcagcagctgatacagcgcctccggctgatcaagtctcctgcagaaattgaacgaatgcagattgctgggaagctgacatcacaggtatga

SEQ ID NO: 86 - protein, 211 aa, Homo sapiens
MSLIQKEAQGQSGTDQTVVVLSNPTYYMSNDIPYTFHQDNNFLYLCGFQEPDSILVLQSLPGKQLPSHKAILFVPRRDPSRELWDGPRSGTDGAIALTGVDEAYTLEEFQHLLPKMKVLLPALQKEVLFSKNDPCITASESPAETNMVWYDWMRPSHAQLHSDYMQPLTEAKAKSKNKVRGVQQLIQRLRLIKSPAEIERMQIAGKLTSQV

SEQ ID NO: 87 - DNA, 804 bp, Homo sapiens
  CDS (1)...(804)
atgttgtgttcacagcgaaggtactcccttcagcctgtcccagaaaggaggattccaaaccgatacttaggccagcccagcccctttacacacccacacctcctcagaccaggggaggtaactccaggactatctcaggtggaatatgcacttcgcagacacaaactaatgtctctgatccagaaggaagctcaagggcagagtgggacagaccagacagtggttgtgctctccaaccctacatactacatgagcaacgatattccctatactttccaccaagacaacaatttcctgtacctatgtggattccaagagcctgatagcattcttgtccttcagagcctccctggcaaacaattaccatcacacaaagccatactttttgtgcctcggcgagatcccagtcgagaactttgggatggtccgcgatctggcactgatggagcaatagctctaactggagtagacgaagcctatacgctagaagaatttcaacatcttctaccaaaaatgaaagtgctcttgccagctcttcaaaaggaggtactgttctccaagaacgatccatgcatcacagcatcagaatcacctgctgagacgaacatggtttggtatgactggatgaggccctcacatgcacagcttcactctgactatatgcagcccctgactgaggccaaagccaagagcaagaacaaggttcggggtgttcagcagctgatacagcgcctccggctgatcaagtctcctgcagaaattgaacgaatgcagattgctgggaagctgacatcacaggtatga

SEQ ID NO: 88 - protein, 267 aa, Homo sapiens
MLCSQRRYSLQPVPERRIPNRYLGQPSPFTHPHLLRPGEVTPGLSQVEYALRRHKLMSLIQKEAQGQSGTDQTVVVLSNPTYYMSNDIPYTFHQDNNFLYLCGFQEPDSILVLQSLPGKQLPSHKAILFVPRRDPSRELWDGPRSGTDGAIALTGVDEAYTLEEFQHLLPKMKVLLPALQKEVLFSKNDPCITASESPAETNMVWYDWMRPSHAQLHSDYMQPLTEAKAKSKNKVRGVQQLIQRLRLIKSPAEIERMQIAGKLTSQV

SEQ ID NO: 89 - DNA, 561 bp, Homo sapiens
  CDS (1)...(561)
atgtctctgatccagaaggaagctcaagggcagagtgggacagaccagacagtggttgtgctctccaaccctacatactacatgagcaacgatattccctatactttccaccaagacaacaatttcctgtacctatgtggattccaagagcctgatagcattcttgtccttcagagcctccctggcaaacaattaccatcacacaaagccatactttttgtgcctcggcgagatcccagtcgagaactttgggatggtccgcgatctggcactgatggagcaatagctctaactggagtagacgaagcctatacgctagaagaatttcaacatcttctaccaaaaatgaaagctgagacgaacatggtttggtatgactggatgaggccctcacatgcacagcttcactctgactatatgcagcccctgactgaggccaaagccaagagcaagaacaaggttcggggtgttcagcagctgatacagcgcctccggctgatcaagtctcctgcagaaattgaacgaatgcagattgctgggaagctgacatcacaggtatga

SEQ ID NO: 90 - protein, 186 aa, Homo sapiens
MSLIQKEAQGQSGTDQTVVVLSNPTYYMSNDIPYTFHQDNNFLYLCGFQEPDSILVLQSLPGKQLPSHKAILFVPRRDPSRELWDGPRSGTDGAIALTGVDEAYTLEEFQHLLPKMKAETNMVWYDWMRPSHAQLHSDYMQPLTEAKAKSKNKVRGVQQLIQRLRLIKSPAEIERMQIAGKLTSQV

SEQ ID NO: 91 - DNA, 729 bp, Homo sapiens
  CDS (1)...(729)
atgttgtgttcacagcgaaggtactcccttcagcctgtcccagaaaggaggattccaaaccgatacttaggccagcccagcccctttacacacccacacctcctcagaccaggggaggtaactccaggactatctcaggtggaatatgcacttcgcagacacaaactaatgtctctgatccagaaggaagctcaagggcagagtgggacagaccagacagtggttgtgctctccaaccctacatactacatgagcaacgatattccctatactttccaccaagacaacaatttcctgtacctatgtggattccaagagcctgatagcattcttgtccttcagagcctccctggcaaacaattaccatcacacaaagccatactttttgtgcctcggcgagatcccagtcgagaactttgggatggtccgcgatctggcactgatggagcaatagctctaactggagtagacgaagcctatacgctagaagaatttcaacatcttctaccaaaaatgaaagctgagacgaacatggtttggtatgactggatgaggccctcacatgcacagcttcactctgactatatgcagcccctgactgaggccaaagccaagagcaagaacaaggttcggggtgttcagcagctgatacagcgcctccggctgatcaagtctcctgcagaaattgaacgaatgcagattgctgggaagctgacatcacaggtatga

SEQ ID NO: 92 - protein, 242 aa, Homo sapiens [sequence omitted]

SEQ ID NO: 93 - DNA, 1362 bp, Homo sapiens
  CDS (1)...(1362)
atgtctctgatccagaaggaagctcaagggcagagtgggacagaccagacagtggttgtgctctccaaccctacatactacatgagcaacgatattccctatactttccaccaagacaacaatttcctgtacctatgtggattccaagagcctgatagcattcttgtccttcagagcctccctggcaaacaattaccatcacacaaagccatactttttgtgcctcggcgagatcccagtcgagaactttgggatggtccgcgatctggcactgatggagcaatagctctaactggagtagacgaagcctatacgctagaagaatttcaacatcttctaccaaaaatgaaagtgctcttgccagctcttcaaaaggaggtactgttctccaagaacgatccatgcatcacagcatcagaatcacctgctgagacgaacatggtttggtatgactggatgaggccctcacatgcacagcttcactctgactatatgcagcccctgactgaggccaaagccaagagcaagaacaaggttcggggtgttcagcagctgatacagcgcctccggctgatcaagtctcctgcagaaattgaacgaatgcagattgctgggaagctgacatcacaggctttcatagaaaccatgttcaccagtaaagcccctgtggaagaagcctttctttatgctaagtttgaatttgaatgccgggctcgtggcgcagacattttagcctatccacctgtggtggctggtggtaatcggtcaaacactttgcactatgtgaaaaataatcaactcatcaaggatggggaaatggtgcttctggatggaggttgtgagtcttcctgctatgtgagtgacatcacacgtacgtggccagtcaatggcaggttcaccgcacctcaggcagaactctatgaagccgttctagagatccaaagagattgtttggccctctgcttccctgggacaagcttggagaacatctacagcatgatgctgaccctgataggacagaagcttaaagacttggggatcatgaagaacattaaggaaaataatgccttcaaggctgctcgaaaatactgtcctcatcatgttggccactacctcgggatggatgtccatgacactccagacatgccccgttccctccctctgcagcctgggatggtaatcacaattgagcccggcatttatattccagaggatgacaaagatgccccagagaagtttcggggtcttggtgtacgaattgaggatgatgtagtggtgactcaggactcacctctcatcctttctgcagactgtcccaaagagatgaatgacattgaacagatatgcagccaggcttcttga

SEQ ID NO: 94 - protein, 453 aa, Homo sapiens
MSLIQKEAQGQSGTDQTVVVLSNPTYYMSNDIPYTFHQDNNFLYLCGFQEPDSILVLQSLPGKQLPSHKAILFVPRRDPSRELWDGPRSGTDGAIALTGVDEAYTLEEFQHLLPKMKVLLPALQKEVLFSKNDPCITASESPAETNMVWYDWMRPSHAQLHSDYMQPLTEAKAKSKNKVRGVQQLIQRLRLIKSPAEIERMQIAGKLTSQAFIETMFTSKAPVEEAFLYAKFEFECRARGADILAYPPVVAGGNRSNTLHYVKNNQLIKDGEMVLLDGGCESSCYVSDITRTWPVNGRFTAPQAELYEAVLEIQRDCLALCFPGTSLENIYSMMLTLIGQKLKDLGIMKNIKENNAFKAARKYCPHHVGHYLGMDVHDTPDMPRSLPLQPGMVITIEPGIYIPEDDKDAPEKFRGLGVRIEDDVVVTQDSPLILSADCPKEMNDIEQICSQAS

SEQ ID NO: 95 - DNA, 1599 bp, Homo sapiens
  CDS (1)...(1599)
atgccttggctgctctcagcccccaagctggttcccgctgtagcaaacgtccgcggcctctcaggatgtatgttgtgttcacagcgaaggtactcccttcagcctgtcccagaaaggaggattccaaaccgatacttaggccagcccagcccctttacacacccacacctcctcagaccaggggaggtaactccaggactatctcaggtggaatatgcacttcgcagacacaaactaatgtctctgatccagaaggaagctcaagggcagagtgggacagaccagacagtggttgtgctctccaaccctacatactacatgagcaacgatattccctatactttccaccaagacaacaatttcctgtacctatgtggattccaagagcctgatagcattcttgtccttcagagcctccctggcaaacaattaccatcacacaaagccatactttttgtgcctcggcgagatcccagtcgagaactttgggatggtccgcgatctggcactgatggagcaatagctctaactggagtagacgaagcctatacgctagaagaatttcaacatcttctaccaaaaatgaaagtgctcttgccagctcttcaaaaggaggtactgttctccaagaacgatccatgcatcacagcatcagaatcacctgctgagacgaacatggtttggtatgactggatgaggccctcacatgcacagcttcactctgactatatgcagcccctgactgaggccaaagccaagagcaagaacaaggttcggggtgttcagcagctgatacagcgcctccggctgatcaagtctcctgcagaaattgaacgaatgcagattgctgggaagctgacatcacaggctttcatagaaaccatgttcaccagtaaagcccctgtggaagaagcctttctttatgctaagtttgaatttgaatgccgggctcgtggcgcagacattttagcctatccacctgtggtggctggtggtaatcggtcaaacactttgcactatgtgaaaaataatcaactcatcaaggatggggaaatggtgcttctggatggaggttgtgagtcttcctgctatgtgagtgacatcacacgtacgtggccagtcaatggcaggttcaccgcacctcaggcagaactctatgaagccgttctagagatccaaagagattgtttggccctctgcttccctgggacaagcttggagaacatctacagcatgatgctgaccctgataggacagaagcttaaagacttggggatcatgaagaacattaaggaaaataatgccttcaaggctgctcgaaaatactgtcctcatcatgttggccactacctcgggatggatgtccatgacactccagacatgccccgttccctccctctgcagcctgggatggtaatcacaattgagcccggcatttatattccagaggatgacaaagatgccccagagaagtttcggggtcttggtgtacgaattgaggatgatgtagtggtgactcaggactcacctctcatcctttctgcagactgtcccaaagagatgaatgacattgaacagatatgcagccaggcttcttga

SEQ ID NO: 96 - protein, 532 aa, Homo sapiens
MPWLLSAPKLVPAVANVRGLSGCMLCSQRRYSLQPVPERRIPNRYLGQPSPFTHPHLLRPGEVTPGLSQVEYALRRHKLMSLIQKEAQGQSGTDQTVVVLSNPTYYMSNDIPYTFHQDNNFLYLCGFQEPDSILVLQSLPGKQLPSHKAILFVPRRDPSRELWDGPRSGTDGAIALTGVDEAYTLEEFQHLLPKMKVLLPALQKEVLFSKNDPCITASESPAETNMVWYDWMRPSHAQLHSDYMQPLTEAKAKSKNKVRGVQQLIQRLRLIKSPAEIERMQIAGKLTSQAFIETMFTSKAPVEEAFLYAKFEFECRARGADILAYPPVVAGGNRSNTLHYVKNNQLIKDGEMVLLDGGCESSCYVSDITRTWPVNGRFTAPQAELYEAVLEIQRDCLALCFPGTSLENIYSMMLTLIGQKLKDLGIMKNIKENNAFKAARKYCPHHVGHYLGMDVHDTPDMPRSLPLQPGMVITIEPGIYIPEDDKDAPEKFRGLGVRIEDDVVVTQDSPLILSADCPKEMNDIEQICSQAS

SEQ ID NO: 97 - DNA, 1287 bp, Homo sapiens
  CDS (1)...(1287)
atgtctctgatccagaaggaagctcaagggcagagtgggacagaccagacagtggttgtgctctccaaccctacatactacatgagcaacgatattccctatactttccaccaagacaacaatttcctgtacctatgtggattccaagagcctgatagcattcttgtccttcagagcctccctggcaaacaattaccatcacacaaagccatactttttgtgcctcggcgagatcccagtcgagaactttgggatggtccgcgatctggcactgatggagcaatagctctaactggagtagacgaagcctatacgctagaagaatttcaacatcttctaccaaaaatgaaagctgagacgaacatggtttggtatgactggatgaggccctcacatgcacagcttcactctgactatatgcagcccctgactgaggccaaagccaagagcaagaacaaggttcggggtgttcagcagctgatacagcgcctccggctgatcaagtctcctgcagaaattgaacgaatgcagattgctgggaagctgacatcacaggctttcatagaaaccatgttcaccagtaaagcccctgtggaagaagcctttctttatgctaagtttgaatttgaatgccgggctcgtggcgcagacattttagcctatccacctgtggtggctggtggtaatcggtcaaacactttgcactatgtgaaaaataatcaactcatcaaggatggggaaatggtgcttctggatggaggttgtgagtcttcctgctatgtgagtgacatcacacgtacgtggccagtcaatggcaggttcaccgcacctcaggcagaactctatgaagccgttctagagatccaaagagattgtttggccctctgcttccctgggacaagcttggagaacatctacagcatgatgctgaccctgataggacagaagcttaaagacttggggatcatgaagaacattaaggaaaataatgccttcaaggctgctcgaaaatactgtcctcatcatgttggccactacctcgggatggatgtccatgacactccagacatgccccgttccctccctctgcagcctgggatggtaatcacaattgagcccggcatttatattccagaggatgacaaagatgccccagagaagtttcggggtcttggtgtacgaattgaggatgatgtagtggtgactcaggactcacctctcatcctttctgcagactgtcccaaagagatgaatgacattgaacagatatgcagccaggcttcttga

SEQ ID NO: 98 - protein, 428 aa, Homo sapiens
MSLIQKEAQGQSGTDQTVVVLSNPTYYMSNDIPYTFHQDNNFLYLCGFQEPDSILVLQSLPGKQLPSHKAILFVPRRDPSRELWDGPRSGTDGAIALTGVDEAYTLEEFQHLLPKMKAETNMVWYDWMRPSHAQLHSDYMQPLTEAKAKSKNKVRGVQQLIQRLRLIKSPAEIERMQIAGKLTSQAFIETMFTSKAPVEEAFLYAKFEFECRARGADILAYPPVVAGGNRSNTLHYVKNNQLIKDGEMVLLDGGCESSCYVSDITRTWPVNGRFTAPQAELYEAVLEIQRDCLALCFPGTSLENIYSMMLTLIGQKLKDLGIMKNIKENNAFKAARKYCPHHVGHYLGMDVHDTPDMPRSLPLQPGMVITIEPGIYIPEDDKDAPEKFRGLGVRIEDDVVVTQDSPLILSADCPKEMNDIEQICSQAS

SEQ ID NO: 99 - DNA, 1530 bp, Homo sapiens
  CDS (1)...(1530)
atgttgtgttcacagcgaaggtactcccttcagcctgtcccagaaaggaggattccaaaccgatacttaggccagcccagcccctttacacacccacacctcctcagaccaggggaggtaactccaggactatctcaggtggaatatgcacttcgcagacacaaactaatgtctctgatccagaaggaagctcaagggcagagtgggacagaccagacagtggttgtgctctccaaccctacatactacatgagcaacgatattccctatactttccaccaagacaacaatttcctgtacctatgtggattccaagagcctgatagcattcttgtccttcagagcctccctggcaaacaattaccatcacacaaagccatactttttgtgcctcggcgagatcccagtcgagaactttgggatggtccgcgatctggcactgatggagcaatagctctaactggagtagacgaagcctatacgctagaagaatttcaacatcttctaccaaaaatgaaagtgctcttgccagctcttcaaaaggaggtactgttctccaagaacgatccatgcatcacagcatcagaatcacctgctgagacgaacatggtttggtatgactggatgaggccctcacatgcacagcttcactctgactatatgcagcccctgactgaggccaaagccaagagcaagaacaaggttcggggtgttcagcagctgatacagcgcctccggctgatcaagtctcctgcagaaattgaacgaatgcagattgctgggaagctgacatcacaggctttcatagaaaccatgttcaccagtaaagcccctgtggaagaagcctttctttatgctaagtttgaatttgaatgccgggctcgtggcgcagacattttagcctatccacctgtggtggctggtggtaatcggtcaaacactttgcactatgtgaaaaataatcaactcatcaaggatggggaaatggtgcttctggatggaggttgtgagtcttcctgctatgtgagtgacatcacacgtacgtggccagtcaatggcaggttcaccgcacctcaggcagaactctatgaagccgttctagagatccaaagagattgtttggccctctgcttccctgggacaagcttggagaacatctacagcatgatgctgaccctgataggacagaagcttaaagacttggggatcatgaagaacattaaggaaaataatgccttcaaggctgctcgaaaatactgtcctcatcatgttggccactacctcgggatggatgtccatgacactccagacatgccccgttccctccctctgcagcctgggatggtaatcacaattgagcccggcatttatattccagaggatgacaaagatgccccagagaagtttcggggtcttggtgtacgaattgaggatgatgtagtggtgactcaggactcacctctcatcctttctgcagactgtcccaaagagatgaatgacattgaacagatatgcagccaggcttcttga

SEQ ID NO: 100 - protein, 509 aa, Homo sapiens
MLCSQRRYSLQPVPERRIPNRYLGQPSPFTHPHLLRPGEVTPGLSQVEYALRRHKLMSLIQKEAQGQSGTDQTVVVLSNPTYYMSNDIPYTFHQDNNFLYLCGFQEPDSILVLQSLPGKQLPSHKAILFVPRRDPSRELWDGPRSGTDGAIALTGVDEAYTLEEFQHLLPKMKVLLPALQKEVLFSKNDPCITASESPAETNMVWYDWMRPSHAQLHSDYMQPLTEAKAKSKNKVRGVQQLIQRLRLIKSPAEIERMQIAGKLTSQAFIETMFTSKAPVEEAFLYAKFEFECRARGADILAYPPVVAGGNRSNTLHYVKNNQLIKDGEMVLLDGGCESSCYVSDITRTWPVNGRFTAPQAELYEAVLEIQRDCLALCFPGTSLENIYSMMLTLIGQKLKDLGIMKNIKENNAFKAARKYCPHHVGHYLGMDVHDTPDMPRSLPLQPGMVITIEPGIYIPEDDKDAPEKFRGLGVRIEDDVVVTQDSPLILSADCPKEMNDIEQICSQAS

SEQ ID NO: 101 - DNA, 1455 bp, Homo sapiens
  CDS (1)...(1455)
atgttgtgttcacagcgaaggtactcccttcagcctgtcccagaaaggaggattccaaaccgatacttaggccagcccagcccctttacacacccacacctcctcagaccaggggaggtaactccaggactatctcaggtggaatatgcacttcgcagacacaaactaatgtctctgatccagaaggaagctcaagggcagagtgggacagaccagacagtggttgtgctctccaaccctacatactacatgagcaacgatattccctatactttccaccaagacaacaatttcctgtacctatgtggattccaagagcctgatagcattcttgtccttcagagcctccctggcaaacaattaccatcacacaaagccatactttttgtgcctcggcgagatcccagtcgagaactttgggatggtccgcgatctggcactgatggagcaatagctctaactggagtagacgaagcctatacgctagaagaatttcaacatcttctaccaaaaatgaaagctgagacgaacatggtttggtatgactggatgaggccctcacatgcacagcttcactctgactatatgcagcccctgactgaggccaaagccaagagcaagaacaaggttcggggtgttcagcagctgatacagcgcctccggctgatcaagtctcctgcagaaattgaacgaatgcagattgctgggaagctgacatcacaggctttcatagaaaccatgttcaccagtaaagcccctgtggaagaagcctttctttatgctaagtttgaatttgaatgccgggctcgtggcgcagacattttagcctatccacctgtggtggctggtggtaatcggtcaaacactttgcactatgtgaaaaataatcaactcatcaaggatggggaaatggtgcttctggatggaggttgtgagtcttcctgctatgtgagtgacatcacacgtacgtggccagtcaatggcaggttcaccgcacctcaggcagaactctatgaagccgttctagagatccaaagagattgtttggccctctgcttccctgggacaagcttggagaacatctacagcatgatgctgaccctgataggacagaagcttaaagacttggggatcatgaagaacattaaggaaaataatgccttcaaggctgctcgaaaatactgtcctcatcatgttggccactacctcgggatggatgtccatgacactccagacatgccccgttccctccctctgcagcctgggatggtaatcacaattgagcccggcatttatattccagaggatgacaaagatgccccagagaagtttcggggtcttggtgtacgaattgaggatgatgtagtggtgactcaggactcacctctcatcctttctgcagactgtcccaaagagatgaatgacattgaacagatatgcagccaggcttcttga

SEQ ID NO: 102 - protein, 484 aa, Homo sapiens
MLCSQRRYSLQPVPERRIPNRYLGQPSPFTHPHLLRPGEVTPGLSQVEYALRRHKLMSLIQKEAQGQSGTDQTVVVLSNPTYYMSNDIPYTFHQDNNFLYLCGFQEPDSILVLQSLPGKQLPSHKAILFVPRRDPSRELWDGPRSGTDGAIALTGVDEAYTLEEFQHLLPKMKAETNMVWYDWMRPSHAQLHSDYMQPLTEAKAKSKNKVRGVQQLIQRLRLIKSPAEIERMQIAGKLTSQAFIETMFTSKAPVEEAFLYAKFEFECRARGADILAYPPVVAGGNRSNTLHYVKNNQLIKDGEMVLLDGGCESSCYVSDITRTWPVNGRFTAPQAELYEAVLEIQRDCLALCFPGTSLENIYSMMLTLIGQKLKDLGIMKNIKENNAFKAARKYCPHHVGHYLGMDVHDTPDMPRSLPLQPGMVITIEPGIYIPEDDKDAPEKFRGLGVRIEDDVVVTQDSPLILSADCPKEMNDIEQICSQAS

SEQ ID NO: 103 - DNA, 3208 bp, Homo sapiens
gcggccctgcaggcggttgcgttccccgtcgttaccctctttctcttcccgacgcgtgagttaggccgtaatgccttggctgctctcagcccccaagctggttcccgctgtagcaaacgtccgcggcctctcagtcctgaatcctctggactgtttcccctgtatgtttccctggaagcttcaggcagtgcctcataagccaatggaatctgttgctaatagccacagcatatcccttgcataatatgacctctagattactgcgccttaattgcttcccagctcttctatgctttggtttagaaaaatgaagtactgacttacgggtgaagaaagtattcaaacagttgacatatttatttcagtcaagaaacagttcagagggagatacaaacaagtaacttagttacaatataatagttatgatgagaggaagtactggatgctaaacaattatatgagagacagctcaggctgggggtgtcaatgaaagcctcttggaggaagtagcctgatatgttaactttctgcatgccagtgaagacactatgtgtgcatgagtacgtgtgcacgagcgtgcatgtggagaaggtgcaggaggagagaaagagaaatcaccaatgcaacagcagcctactccaccagtgggttagtgctgctggagggagatgaaaagattaggaaggatgtatgttgtgttcacagcgaaggtactcccttcagcctgtcccagaaaggaggattccaaaccgatacttaggccagcccagcccctttacacacccacacctcctcagaccagactcgaattcctgctgggaagtcggctgaaactaaggaaatgcagctcaccactgaaacccacaagaaatcagagtttttcaaagctgtaaggggaggtaactccaggactatctcaggtggaatatgcacttcgcagacacaaactaatgtctctgatccagaaggaagctcaagggcagagtgggacagaccagacagtggttgtgctctccaaccctacatactacatgagcaacgatattccctatactttccaccaagacaacaatttcctgtacctatgtggattccaagagcctgatagcattcttgtccttcagagcctccctggcaaacaattaccatcacacaaagccatactttttgtgcctcggcgagatcccagtcgagaactttgggatggtccgcgatctggcactgatggagcaatagctctaactggagtagacgaagcctatacgctagaagaatttcaacatcttctaccaaaaatgaaagtgctcttgccagctcttcaaaaggaggtactgttctccaagaacgatccatgcatcacagcatcagaatcacctgctgagacgaacatggtttggtatgactggatgaggccctcacatgcacagcttcactctgactatatgcagcccctgactgaggccaaagccaagagcaagaacaaggttcggggtgttcagcagctgatacagcgcctccggctgatcaagtctcctgcagaaattgaacgaatgcagattgctgggaagctgacatcacaggtatgattcctattgaaaagttttttccagccgggcgcggtggctcacgcctgtaatccaagcactttgggaggccgaggcaggtggatcatgaggtcaggagatcgagaccatcctggctaacatggtgaaaccccgtctctactaaaaaaacataaaaaattagccgggcatggtggcgggctcctgtagtcccagctactcggtaggctgaggcaggagaatggtgtgaacccgggaggcagagcttgcagtgagccgagatcgggccactgcactccagcctggcgacagacgagattcatcttaaaaaaaaaaaaaaaaaaaactttcatagaaaccatgttcaccagtaaagcccctgtggaagaagcctttctttatgctaagtttgaatttgaatgccgggctcgtggcgcagacattttagcctatccacctgtggtggctggtggtaatcggtcaaacactttgcactatgtgaaaaataatcaactcatcaaggatggggaaatggtgcttctggatggaggttgtgagtcttcctgctatgtgagtgacatcacacgtacgtggccagtcaatggcaggttcaccgcacctcaggcagaactctatgaagccgttctagagatccaaagagattgtttggccctctgcttccctgggacaagcttggagaacatctacagcatgatgctgaccctgataggacagaagcttaaagacttggggatcatgaagaacattaaggaaaataatgccttcaaggctgctcgaaaatactgtcctcatcatgttggccactacctcgggatggatgtccatgacactccagacatgccccgttccctccctctgcagcctgggatggtaatcacaattgagcccggcatttatattccagaggatgacaaagatgccccagagaagtttcggggtcttggtgtacgaattgaggatgatgtagtggtgactcaggactcacctctcatcctttctgcagactgtcccaaagagatgaatgacattgaacagatatgcagccaggcttcttgaccttcactgcggcccacatgcacctcaggttcaaaatgggtgtcttctggcagccctgcacgtgtgctttctgagtgtctctgtgtgtgcattaatatatgcattccatttgggagcataaaaaaaaaaaaaaaaatggaatgcagtagccctctgggcctgggatattgtggttgataactgtgccatctgcaggaaccacattatggatctttgcatagaatgtcaagctaaccaggcgtccgctacttcagaagagtgtactgtcgcatggggagtctgtaaccatgcttttcacttccactgcatctctcgctggctcaaaacacgacaggtgtgtccattggacaacagagagtgggaattccaaaagtatgggcactaggaaaagacttcttccatcaagcttaattgttttgttattcatttaatgactttccctgctgttacctaattacaaattggatggaactgtgtttttttctgctttgttttttcagtttgctgtttctgtagccatattggattctgtgtcaaataaagtccagttggattctggaaaaaaaaaa

SEQ ID NO: 104 - DNA, 5076 bp, Homo sapiens
  CDS (1)...(5076)
atggcttcctggacgagcccctggtgggtgctgatagggatggtcttcatgcactctcccctcccgcagaccacagctgagaaatctcctggagcctatttccttcccgagtttgcactttctcctcagggaagttttctggaagacacaacaggggagcagttcctcacttatcgctatgatgaccagacctcaagaaacactcgttcagatgaagacaaagatggcaactgggatgcttggggcgactggagtgactgctcccggacctgtgggggaggagcatcatattctctgcggagatgtttgactggaaggaattgtgaagggcagaacattcggtacaagacatgcagcaatcatgactgccctccagatgcagaagatttcagagcccagcagtgctcagcctacaatgatgtccagtatcaggggcattactatgaatggcttccacgatataatgatcctgctgccccgtgtgcactcaagtgtcatgcacaaggacaaaacttggtggtggagctggcacctaaggtactggatggaactcgttgcaacacggactccttggacatgtgtatcagtggcatctgtcaggcagtgggctgcgatcggcaactgggaagcaatgccaaggaggacaactgtggagtctgtgccggcgatggctccacctgcaggcttgtacggggacaatcaaagtcacacgtttctcctgaaaaaagagaagaaaatgtaattgctgttcctttgggaagtcgaagtgtgagaattacagtgaaaggacctgcccacctctttattgaatcaaaaacacttcaaggaagcaaaggagaacacagctttaacagccccggcgtctttgtcgtagaaaacacaacagtggaatttcagaggggctccgagaggcaaacttttaagattccaggacctctgatggctgatttcatcttcaagaccaggtacactgcagccaaagacagcgtggttcagttcttcttttaccagcccatcagtcatcagtggagacaaactgacttctttccctgcactgtgacgtgtggaggaggttatcagctcaattctgctgaatgtgtggatatccgcttgaagagggtagttcctgaccattattgtcactactaccctgaaaatgtaaaaccaaaaccaaaactgaaggaatgcagcatggatccctgcccatcaagtgatggatttaaagagataatgccctatgaccacttccaacctcttcctcgctgggaacataatccttggactgcatgttccgtgtcctgtggaggagggattcagagacggagctttgtgtgtgtagaggaatccatgcatggagagatattgcaggtggaagaatggaagtgcatgtacgcacccaaacccaaggttatgcaaacttgtaatctgtttgattgccccaagtggattgccatggagtggtctcagtgcacagtgacttgtggccgagggttacggtaccgggttgttctgtgtattaaccaccgcggagagcatgttgggggctgcaatccacaactgaagttacacatcaaagaagaatgtgtcattcccatcccgtgttataaaccaaaagaaaaaagtccagtggaagcaaaattgccttggctgaaacaagcacaagaactagaagagaccagaatagcaacagaagaaccaacgttcattccagaaccctggtcagcctgcagtaccacgtgtgggccaggtgtgcaggtccgcgaggtgaagtgccgtgtgctcctcacattcacgcagactgagactgagctgcccgaggaagagtgtgaaggccccaagctgcccaccgaacggccctgcctcctggaagcatgtgatgagagcccggcctcccgagagctagacatccctctccctgaggacagtgagacgacttacgactgggagtacgctgggttcaccccttgcacagcaacatgcttgggaggccatcaagaagccatagcagtgtgcttacatatccagacccagcagacagtcaatgacagcttgtgtgatatggtccaccgtcctccagccatgagccaggcctgtaacacagagccctgtccccccaggtggcatgtgggctcttgggggccctgctcagctacctgtggagttggaattcagacccgagatgtgtactgcctgcacccaggggagacccctgcccctcctgaggagtgccgagatgaaaagccccatgctttacaagcatgcaatcagtttgactgccctcctggctggcacattgaagaatggcagcagtgttccaggacttgtggcgggggaactcagaacagaagagtcacctgtcggcagctgctaacggatggcagctttttgaatctctcagatgaattgtgccaaggacccaaggcatcgtctcacaagtcctgtgccaggacagactgtcctccacatttagctgtgggagactggtcgaagtgttctgtcagttgtggtgttggaatccagagaagaaagcaggtgtgtcaaaggctggcagccaaaggtcggcgcatccccctcagtgagatgatgtgcagggatctaccagggttccctcttgtaagatcttgccagatgcctgagtgcagtaaaatcaaatcagagatgaagacaaaacttggtgagcagggtccgcagatcctcagtgtccagagagtctacattcagacaagggaagagaagcgtattaacctgaccattggtagcagagcctatttgctgcccaacacatccgtgattattaagtgccccgtgcgacgattccagaaatctctgatccagtgggagaaggatggccgttgcctgcagaactccaaacggcttggcatcaccaagtcaggctcactaaaaatccacggtcttgctgcccccgacatcggcgtgtaccggtgcattgcaggctctgcacaggaaacagttgtgctcaagctcattggtactgacaaccggctcatcgcacgcccagccctcagggagcctatgagggaatatcctgggatggaccacagcgaagccaatagtttgggagtcacatggcacaaaatgaggcaaatgtggaataacaaaaatgacctttatctggatgatgaccacattagtaaccagcctttcttgagagctctgttaggccactgcagcaattctgcaggaagcaccaactcctgggagttgaagaataagcagtttgaagcagcagttaaacaaggagcatatagcatggatacagcccagtttgatgagctgataagaaacatgagtcagctcatggaaaccggagaggtcagcgatgatcttgcgtcccagctgatatatcagctggtggccgaattagccaaggcacagccaacacacatgcagtggcggggcatccaggaagagacacctcctgctgctcagctcagaggggaaacagggagtgtgtcccaaagctcgcatgcaaaaaactcaggcaagctgacattcaagccgaaaggacctgttctcatgaggcaaagccaacctccctcaatttcatttaataaaacaataaattccaggattggaaatacagtatacattacaaaaaggacagaggtcatcaatatactgtgtgaccttattacccccagtgaggccacatatacatggaccaaggatggaaccttgttacagccctcagtaaaaataattttggatggaactgggaagatacagatacagaatcctacaaggaaagaacaaggcatatatgaatgttctgtagctaatcatcttggttcagatgtggaaagttcttctgtgctgtatgcagaggcacctgtcatcttgtctgttgaaagaaatatcaccaaaccagagcacaaccatctgtctgttgtggttggaggcatcgtggaggcagcccttggagcaaacgtgacaatccgatgtcctgtaaaaggtgtccctcagcctaatataacttggttgaagagaggaggatctctgagtggcaatgtttccttgcttttcaatggatccctgttgttgcagaatgtttcccttgaaaatgaaggaacctacgtctgcatagccaccaatgctcttggaaaggcagtggcaacatctgtactccacttgctggaacgaagatggccagagagtagaatcgtatttctgcaaggacataaaaagtacattctccaggcaaccaacactagaaccaacagcaatgacccaacaggagaacccccgcctcaagagcctttttgggagcctggtaactggtcacattgttctgccacctgtggtcatttgggagcccgcattcagagaccccagtgtgtgatggccaatgggcaggaagtgagtgaggccctgtgtgatcacctccagaagccactggctgggtttgagccctgtaacatccgggactgcccagcgaggtggttcacaagtgtgtggtcacagtgctctgtgtcttgcggtgaaggataccacagtcggcaggtgacgtgcaagcggacaaaagccaatggaactgtgcaggtggtgtctccaagagcatgtgcccctaaagaccggcctctgggaagaaaaccatgttttggtcatccatgtgttcagtgggaaccagggaaccggtgtcctggacgttgcatgggccgtgctgtgaggatgcagcagcgtcacacagcttgtcaacacaacagctctgactccaactgtgatgacagaaagagacccaccttaagaaggaactgcacatcaggggcctgtgatgtgtgttggcacacaggcccttggaagccctgtacagcagcctgtggcaggggtttccagtctcggaaagtcgactgtatccacacaaggagttgcaaacctgtggccaagagacactgtgtacagaaaaagaaaccaatttcctggcggcactgtcttgggccctcctgtgatagagactgcacagacacaactcactactgtatgtttgtaaaacatcttaatttgtgttctctagaccgctacaaacaaaggtgctgccagtcatgtcaagagggataa

SEQ ID NO: 105 - protein, 1691 aa, Homo sapiens
MASWTSPWWVLIGMVFMHSPLPQTTAEKSPGAYFLPEFALSPQGSFLEDTTGEQFLTYRYDDQTSRNTRSDEDKDGNWDAWGDWSDCSRTCGGGASYSLRRCLTGRNCEGQNIRYKTCSNHDCPPDAEDFRAQQCSAYNDVQYQGHYYEWLPRYNDPAAPCALKCHAQGQNLVVELAPKVLDGTRCNTDSLDMCISGICQAVGCDRQLGSNAKEDNCGVCAGDGSTCRLVRGQSKSHVSPEKREENVIAVPLGSRSVRITVKGPAHLFIESKTLQGSKGEHSFNSPGVFVVENTTVEFQRGSERQTFKIPGPLMADFIFKTRYTAAKDSVVQFFFYQPISHQWRQTDFFPCTVTCGGGYQLNSAECVDIRLKRVVPDHYCHYYPENVKPKPKLKECSMDPCPSSDGFKEIMPYDHFQPLPRWEHNPWTACSVSCGGGIQRRSFVCVEESMHGEILQVEEWKCMYAPKPKVMQTCNLFDCPKWIAMEWSQCTVTCGRGLRYRVVLCINHRGEHVGGCNPQLKLHIKEECVIPIPCYKPKEKSPVEAKLPWLKQAQELEETRIATEEPTFIPEPWSACSTTCGPGVQVREVKCRVLLTFTQTETELPEEECEGPKLPTERPCLLEACDESPASRELDIPLPEDSETTYDWEYAGFTPCTATCLGGHQEAIAVCLHIQTQQTVNDSLCDMVHRPPAMSQACNTEPCPPRWHVGSWGPCSATCGVGIQTRDVYCLHPGETPAPPEECRDEKPHALQACNQFDCPPGWHIEEWQQCSRTCGGGTQNRRVTCRQLLTDGSFLNLSDELCQGPKASSHKSCARTDCPPHLAVGDWSKCSVSCGVGIQRRKQVCQRLAAKGRRIPLSEMMCRDLPGFPLVRSCQMPECSKIKSEMKTKLGEQGPQILSVQRVYIQTREEKRINLTIGSRAYLLPNTSVIIKCPVRRFQKSLIQWEKDGRCLQNSKRLGITKSGSLKIHGLAAPDIGVYRCIAGSAQETVVLKLIGTDNRLIARPALREPMREYPGMDHSEANSLGVTWHKMRQMWNNKNDLYLDDDHISNQPFLRALLGHCSNSAGSTNSWELKNKQFEAAVKQGAYSMDTAQFDELIRNMSQLMETGEVSDDLASQLIYQLVAELAKAQPTHMQWRGIQEETPPAAQLRGETGSVSQSSHAKNSGKLTFKPKGPVLMRQSQPPSISFNKTINSRIGNTVYITKRTEVINILCDLITPSEATYTWTKDGTLLQPSVKIILDGTGKIQIQNPTRKEQGIYECSVANHLGSDVESSSVLYAEAPVILSVERNITKPEHNHLSVVVGGIVEAALGANVTIRCPVKGVPQPNITWLKRGGSLSGNVSLLFNGSLLLQNVSLENEGTYVCIATNALGKAVATSVLHLLERRWPESRIVFLQGHKKYILQATNTRTNSNDPTGEPPPQEPFWEPGNWSHCSATCGHLGARIQRPQCVMANGQEVSEALCDHLQKPLAGFEPCNIRDCPARWFTSVWSQCSVSCGEGYHSRQVTCKRTKANGTVQVVSPRACAPKDRPLGRKPCFGHPCVQWEPGNRCPGRCMGRAVRMQQRHTACQHNSSDSNCDDRKRPTLRRNCTSGACDVCWHTGPWKPCTAACGRGFQSRKVDCIHTRSCKPVAKRHCVQKKKPISWRHCLGPSCDRDCTDTTHYCMFVKHLNLCSLDRYKQRCCQSCQEG

SEQ ID NO: 106 - DNA, 1341 bp, Homo sapiens
  CDS (1)...(1341)
atggcttcctggacgagcccctggtgggtgctgatagggatggtcttcatgcactctcccctcccgcagaccacagctgagaaatctcctggagcctatttccttcccgagtttgcactttctcctcagggaagttttctggaagacacaacaggggagcagttcctcacttatcgctatgatgaccagacctcaagaaacactcgttcagatgaagacaaagatggcaactgggatgcttggggcgactggagtgactgctcccggacctgtgggggaggagcatcatattctctgcggagatgtttgactggaaggaattgtgaagggcagaacattcggtacaagacatgcagcaatcatgactgccctccagatgcagaagatttcagagcccagcagtgctcagcctacaatgatgtccagtatcaggggcattactatgaatggcttccacgatataatgatcctgctgccccgtgtgcactcaagtgtcatgcacaaggacaaaacttggtggtggagctggcacctaaggtactggatggaactcgttgcaacacggactccttggacatgtgtatcagtggcatctgtcaggcagtgggctgcgatcggcaactgggaagcaatgccaaggaggacaactgtggagtctgtgccggcgatggctccacctgcaggcttgtacggggacaatcaaagtcacacgtttctcctgaaaaaagagaagaaaatgtaattgctgttcctttgggaagtcgaagtgtgagaattacagtgaaaggacctgcccacctctttattgaatcaaaaacacttcaaggaagcaaaggagaacacagctttaacagccccggcgtctttgtcgtagaaaacacaacagtggaatttcagaggggctccgagaggcaaacttttaagattccaggacctctgatggctgatttcatcttcaagaccaggtacactgcagccaaagacagcgtggttcagttcttcttttaccagcccatcagtcatcagtggagacaaactgacttctttccctgcactgtgacgtgtggaggaggttatcagctcaattctgctgaatgtgtggatatccgcttgaagagggtagttcctgaccattattgtcactactaccctgaaaatgtaaaaccaaaaccaaaactgaaggaatgcagcatggatccctgcccatcaagtgatggatttaaagagataatgccctatgaccacttccaacctcttcctcgagctgggaacataatccttggactgcatgttccgtgtcctgtggaggagggattcagagacggagctttgtgtgtgtag

SEQ ID NO: 107 - protein, 446 aa, Homo sapiens
MASWTSPWWVLIGMVFMHSPLPQTTAEKSPGAYFLPEFALSPQGSFLEDTTGEQFLTYRYDDQTSRNTRSDEDKDGNWDAWGDWSDCSRTCGGGASYSLRRCLTGRNCEGQNIRYKTCSNHDCPPDAEDFRAQQCSAYNDVQYQGHYYEWLPRYNDPAAPCALKCHAQGQNLVVELAPKVLDGTRCNTDSLDMCISGICQAVGCDRQLGSNAKEDNCGVCAGDGSTCRLVRGQSKSHVSPEKREENVIAVPLGSRSVRITVKGPAHLFIESKTLQGSKGEHSFNSPGVFVVENTTVEFQRGSERQTFKIPGPLMADFIFKTRYTAAKDSVVQFFFYQPISHQWRQTDFFPCTVTCGGGYQLNSAECVDIRLKRVVPDHYCHYYPENVKPKPKLKECSMDPCPSSDGFKEIMPYDHFQPLPRAGNIILGLHVPCPVEEGFRDGALCV

SEQ ID NO: 108 - DNA, 1119 bp, Homo sapiens
  CDS (1)...(1119)
atggcttcctggacgagcccctggtgggtgctgatagggatggtcttcatgcactctcccctcccgcagaccacagctgagaaatctcctggaaggaattgtgaagggcagaacattcggtacaagacatgcagcaatcatgactgccctccagatgcagaagatttcagagcccagcagtgctcagcctacaatgatgtccagtatcaggggcattactatgaatggcttccacgatataatgatcctgctgccccgtgtgcactcaagtgtcatgcacaaggacaaaacttggtggtggagctggcacctaaggtactggatggaactcgttgcaacacggactccttggacatgtgtatcagtggcatctgtcaggcagtgggctgcgatcggcaactgggaagcaatgccaaggaggacaactgtggagtctgtgccggcgatggctccacctgcaggcttgtacggggacaatcaaagtcacacgtttctcctgaaaaaagagaagaaaatgtaattgctgttcctttgggaagtcgaagtgtgagaattacagtgaaaggacctgcccacctctttattgaatcaaaaacacttcaaggaagcaaaggagaacacagctttaacagccccggcgtctttgtcgtagaaaacacaacagtggaatttcagaggggctccgagaggcaaacttttaagattccaggacctctgatggctgatttcatcttcaagaccaggtacactgcagccaaagacagcgtggttcagttcttcttttaccagcccatcagtcatcagtggagacaaactgacttctttccctgcactgtgacgtgtggaggaggttatcagctcaattctgctgaatgtgtggatatccgcttgaagagggtagttcctgaccattattgtcactactaccctgaaaatgtaaaaccaaaaccaaaactgaaggaatgcagcatggatccctgcccatcaagtgatggatttaaagagataatgccctatgaccacttccaacctcttcctcgagctgggaacataatccttggactgcatgttccgtgtcctgtggaggagggattcagagacggagctttgtgtgtgtag

SEQ ID NO: 109 - protein, 372 aa, Homo sapiens
MASWTSPWWVLIGMVFMHSPLPQTTAEKSPGRNCEGQNIRYKTCSNHDCPPDAEDFRAQQCSAYNDVQYQGHYYEWLPRYNDPAAPCALKCHAQGQNLVVELAPKVLDGTRCNTDSLDMCISGICQAVGCDRQLGSNAKEDNCGVCAGDGSTCRLVRGQSKSHVSPEKREENVIAVPLGSRSVRITVKGPAHLFIESKTLQGSKGEHSFNSPGVFVVENTTVEFQRGSERQTFKIPGPLMADFIFKTRYTAAKDSVVQFFFYQPISHQWRQTDFFPCTVTCGGGYQLNSAECVDIRLKRVVPDHYCHYYPENVKPKPKLKECSMDPCPSSDGFKEIMPYDHFQPLPRAGNIILGLHVPCPVEEGFRDGALCV

SEQ ID NO: 110 - DNA, 2175 bp, Homo sapiens
  CDS (1)...(2175)
atggcttcctggacgagcccctggtgggtgctgatagggatggtcttcatgcactctcccctcccgcagaccacagctgagaaatctcctggagcctatttccttcccgagtttgcactttctcctcagggaagttttctggaagacacaacaggggagcagttcctcacttatcgctatgatgaccagacctcaagaaacactcgttcagatgaagacaaagatggcaactgggatgcttggggcgactggagtgactgctcccggacctgtgggggaggagcatcatattctctgcggagatgtttgactggaaggaattgtgaagggcagaacattcggtacaagacatgcagcaatcatgactgccctccagatgcagaagatttcagagcccagcagtgctcagcctacaatgatgtccagtatcaggggcattactatgaatggcttccacgatataatgatcctgctgccccgtgtgcactcaagtgtcatgcacaaggacaaaacttggtggtggagctggcacctaaggtactggatggaactcgttgcaacacggactccttggacatgtgtatcagtggcatctgtcaggcagtgggctgcgatcggcaactgggaagcaatgccaaggaggacaactgtggagtctgtgccggcgatggctccacctgcaggcttgtacggggacaatcaaagtcacacgtttctcctgaaaaaagagaagaaaatgtaattgctgttcctttgggaagtcgaagtgtgagaattacagtgaaaggacctgcccacctctttattgaatcaaaaacacttcaaggaagcaaaggagaacacagctttaacagccccggcgtctttgtcgtagaaaacacaacagtggaatttcagaggggctccgagaggcaaacttttaagattccaggacctctgatggctgatttcatcttcaagaccaggtacactgcagccaaagacagcgtggttcagttcttcttttaccagcccatcagtcatcagtggagacaaactgacttctttccctgcactgtgacgtgtggaggaggttatcagctcaattctgctgaatgtgtggatatccgcttgaagagggtagttcctgaccattattgtcactactaccctgaaaatgtaaaaccaaaaccaaaactgaaggaatgcagcatggatccctgcccatcaagtgatggatttaaagagataatgccctatgaccacttccaacctcttcctcgctgggaacataatccttggactgcatgttccgtgtcctgtggaggagggattcagagacggagctttgtgtgtgtagaggaatccatgcatggagagatattgcaggtggaagaatggaagtgcatgtacgcacccaaacccaaggttatgcaaacttgtaatctgtttgattgccccaagtggattgccatggagtggtctcagtgcacagtgacttgtggccgagggttacggtaccgggttgttctgtgtattaaccaccgcggagagcatgttgggggctgcaatccacaactgaagttacacatcaaagaagaatgtgtcattcccatcccgtgttataaaccaaaagaaaaaagtccagtggaagcaaaattgccttggctgaaacaagcacaagaactagaagagaccagaatagcaacagaagaaccaacgttcattccagaaccctggtcagcctgcagtaccacgtgtgggccaggtgtgcaggtccgcgaggtgaagtgccgtgtgctcctcacattcacgcagactgagactgagctgcccgaggaagagtgtgaaggccccaagctgcccaccgaacggccctgcctcctggaagcatgtgatgagagcccggcctcccgagagctagacatccctctccctgaggacagtgagacgacttacgactgggagtacgctgggttcaccccttgcacagcaacatgcttgggaggccatcaagaagccatagcagtgtgcttacatatccagacccagcagacagtcaatgacagcttgtgtgatatggtccaccgtcctccagccatgagccaggcctgtaacacagagccctgtccccccaggagagagccagcagcttgtagaagcatgccgggttacataatggtcctgctagtctga

SEQ ID NO: 111 - protein, 724 aa, Homo sapiens [sequence omitted]

SEQ ID NO: 112 - DNA, 1953 bp, Homo sapiens
  CDS (1)...(1953)
atggcttcctggacgagcccctggtgggtgctgatagggatggtcttcatgcactctcccctcccgcagaccacagctgagaaatctcctggaaggaattgtgaagggcagaacattcggtacaagacatgcagcaatcatgactgccctccagatgcagaagatttcagagcccagcagtgctcagcctacaatgatgtccagtatcaggggcattactatgaatggcttccacgatataatgatcctgctgccccgtgtgcactcaagtgtcatgcacaaggacaaaacttggtggtggagctggcacctaaggtactggatggaactcgttgcaacacggactccttggacatgtgtatcagtggcatctgtcaggcagtgggctgcgatcggcaactgggaagcaatgccaaggaggacaactgtggagtctgtgccggcgatggctccacctgcaggcttgtacggggacaatcaaagtcacacgtttctcctgaaaaaagagaagaaaatgtaattgctgttcctttgggaagtcgaagtgtgagaattacagtgaaaggacctgcccacctctttattgaatcaaaaacacttcaaggaagcaaaggagaacacagctttaacagccccggcgtctttgtcgtagaaaacacaacagtggaatttcagaggggctccgagaggcaaacttttaagattccaggacctctgatggctgatttcatcttcaagaccaggtacactgcagccaaagacagcgtggttcagttcttcttttaccagcccatcagtcatcagtggagacaaactgacttctttccctgcactgtgacgtgtggaggaggttatcagctcaattctgctgaatgtgtggatatccgcttgaagagggtagttcctgaccattattgtcactactaccctgaaaatgtaaaaccaaaaccaaaactgaaggaatgcagcatggatccctgcccatcaagtgatggatttaaagagataatgccctatgaccacttccaacctcttcctcgctgggaacataatccttggactgcatgttccgtgtcctgtggaggagggattcagagacggagctttgtgtgtgtagaggaatccatgcatggagagatattgcaggtggaagaatggaagtgcatgtacgcacccaaacccaaggttatgcaaacttgtaatctgtttgattgccccaagtggattgccatggagtggtctcagtgcacagtgacttgtggccgagggttacggtaccgggttgttctgtgtattaaccaccgcggagagcatgttgggggctgcaatccacaactgaagttacacatcaaagaagaatgtgtcattcccatcccgtgttataaaccaaaagaaaaaagtccagtggaagcaaaattgccttggctgaaacaagcacaagaactagaagagaccagaatagcaacagaagaaccaacgttcattccagaaccctggtcagcctgcagtaccacgtgtgggccaggtgtgcaggtccgcgaggtgaagtgccgtgtgctcctcacattcacgcagactgagactgagctgcccgaggaagagtgtgaaggccccaagctgcccaccgaacggccctgcctcctggaagcatgtgatgagagcccggcctcccgagagctagacatccctctccctgaggacagtgagacgacttacgactgggagtacgctgggttcaccccttgcacagcaacatgcttgggaggccatcaagaagccatagcagtgtgcttacatatccagacccagcagacagtcaatgacagcttgtgtgatatggtccaccgtcctccagccatgagccaggcctgtaacacagagccctgtccccccaggagagagccagcagcttgtagaagcatgccgggttacataatggtcctgctagtctga

SEQ ID NO: 113 - protein, 650 aa, Homo sapiens
MASWTSPWWVLIGMVFMHSPLPQTTAEKSPGRNCEGQNIRYKTCSNHDCPPDAEDFRAQQCSAYNDVQYQGHYYEWLPRYNDPAAPCALKCHAQGQNLVVELAPKVLDGTRCNTDSLDMCISGICQAVGCDRQLGSNAKEDNCGVCAGDGSTCRLVRGQSKSHVSPEKREENVIAVPLGSRSVRITVKGPAHLFIESKTLQGSKGEHSFNSPGVFVVENTTVEFQRGSERQTFKIPGPLMADFIFKTRYTAAKDSVVQFFFYQPISHQWRQTDFFPCTVTCGGGYQLNSAECVDIRLKRVVPDHYCHYYPENVKPKPKLKECSMDPCPSSDGFKEIMPYDHFQPLPRWEHNPWTACSVSCGGGIQRRSFVCVEESMHGEILQVEEWKCMYAPKPKVMQTCNLFDCPKWIAMEWSQCTVTCGRGLRYRVVLCINHRGEHVGGCNPQLKLHIKEECVIPIPCYKPKEKSPVEAKLPWLKQAQELEETRIATEEPTFIPEPWSACSTTCGPGVQVREVKCRVLLTFTQTETELPEEECEGPKLPTERPCLLEACDESPASRELDIPLPEDSETTYDWEYAGFTPCTATCLGGHQEAIAVCLHIQTQQTVNDSLCDMVHRPPAMSQACNTEPCPPRREPAACRSMPGYIMVLLV

SEQ ID NO: 114 - DNA, 2538 bp, Homo sapiens
  CDS (1)...(2538)
atggcttcctggacgagcccctggtgggtgctgatagggatggtcttcatgcactctcccctcccgcagaccacagctgagaaatctcctggagcctatttccttcccgagtttgcactttctcctcagggaagttttctggaagacacaacaggggagcagttcctcacttatcgctatgatgaccagacctcaagaaacactcgttcagatgaagacaaagatggcaactgggatgcttggggcgactggagtgactgctcccggacctgtgggggaggagcatcatattctctgcggagatgtttgactggaaggaattgtgaagggcagaacattcggtacaagacatgcagcaatcatgactgccctccagatgcagaagatttcagagcccagcagtgctcagcctacaatgatgtccagtatcaggggcattactatgaatggcttccacgatataatgatcctgctgccccgtgtgcactcaagtgtcatgcacaaggacaaaacttggtggtggagctggcacctaaggtactggatggaactcgttgcaacacggactccttggacatgtgtatcagtggcatctgtcaggcagtgggctgcgatcggcaactgggaagcaatgccaaggaggacaactgtggagtctgtgccggcgatggctccacctgcaggcttgtacggggacaatcaaagtcacacgtttctcctgaaaaaagagaagaaaatgtaattgctgttcctttgggaagtcgaagtgtgagaattacagtgaaaggacctgcccacctctttattgaatcaaaaacacttcaaggaagcaaaggagaacacagctttaacagccccggcgtctttgtcgtagaaaacacaacagtggaatttcagaggggctccgagaggcaaacttttaagattccaggacctctgatggctgatttcatcttcaagaccaggtacactgcagccaaagacagcgtggttcagttcttcttttaccagcccatcagtcatcagtggagacaaactgacttctttccctgcactgtgacgtgtggaggaggttatcagctcaattctgctgaatgtgtggatatccgcttgaagagggtagttcctgaccattattgtcactactaccctgaaaatgtaaaaccaaaaccaaaactgaaggaatgcagcatggatccctgcccatcaagtgatggatttaaagagataatgccctatgaccacttccaacctcttcctcgctgggaacataatccttggactgcatgttccgtgtcctgtggaggagggattcagagacggagctttgtgtgtgtagaggaatccatgcatggagagatattgcaggtggaagaatggaagtgcatgtacgcacccaaacccaaggttatgcaaacttgtaatctgtttgattgccccaagtggattgccatggagtggtctcagtgcacagtgacttgtggccgagggttacggtaccgggttgttctgtgtattaaccaccgcggagagcatgttgggggctgcaatccacaactgaagttacacatcaaagaagaatgtgtcattcccatcccgtgttataaaccaaaagaaaaaagtccagtggaagcaaaattgccttggctgaaacaagcacaagaactagaagagaccagaatagcaacagaagaaccaacgttcattccagaaccctggtcagcctgcagtaccacgtgtgggccaggtgtgcaggtccgcgaggtgaagtgccgtgtgctcctcacattcacgcagactgagactgagctgcccgaggaagagtgtgaaggccccaagctgcccaccgaacggccctgcctcctggaagcatgtgatgagagcccggcctcccgagagctagacatccctctccctgaggacagtgagacgacttacgactgggagtacgctgggttcaccccttgcacagcaacatgcttgggaggccatcaagaagccatagcagtgtgcttacatatccagacccagcagacagtcaatgacagcttgtgtgatatggtccaccgtcctccagccatgagccaggcctgtaacacagagccctgtccccccaggtggcatgtgggctcttgggggccctgctcagctacctgtggagttggaattcagacccgagatgtgtactgcctgcacccaggggagacccctgcccctcctgaggagtgccgagatgaaaagccccatgctttacaagcatgcaatcagtttgactgccctcctggctggcacattgaagaatggcagcagtgttccaggacttgtggcgggggaactcagaacagaagagtcacctgtcggcagctgctaacggatggcagctttttgaatctctcagatgaattgtgccaaggacccaaggcatcgtctcacaagtcctgtgccaggacagactgtcctccacatttagctgtgggagactggtcgaaggagcattcaatgcaagaggacaatggagcaggatctacacaattctaa

SEQ ID NO: 115 - protein, 845 aa, Homo sapiens
MASWTSPWWVLIGMVFMHSPLPQTTAEKSPGAYFLPEFALSPQGSFLEDTTGEQFLTYRYDDQTSRNTRSDEDKDGNWDAWGDWSDCSRTCGGGASYSLRRCLTGRNCEGQNIRYKTCSNHDCPPDAEDFRAQQCSAYNDVQYQGHYYEWLPRYNDPAAPCALKCHAQGQNLVVELAPKVLDGTRCNTDSLDMCISGICQAVGCDRQLGSNAKEDNCGVCAGDGSTCRLVRGQSKSHVSPEKREENVIAVPLGSRSVRITVKGPAHLFIESKTLQGSKGEHSFNSPGVFVVENTTVEFQRGSERQTFKIPGPLMADFIFKTRYTAAKDSVVQFFFYQPISHQWRQTDFFPCTVTCGGGYQLNSAECVDIRLKRVVPDHYCHYYPENVKPKPKLKECSMDPCPSSDGFKEIMPYDHFQPLPRWEHNPWTACSVSCGGGIQRRSFVCVEESMHGEILQVEEWKCMYAPKPKVMQTCNLFDCPKWIAMEWSQCTVTCGRGLRYRVVLCINHRGEHVGGCNPQLKLHIKEECVIPIPCYKPKEKSPVEAKLPWLKQAQELEETRIATEEPTFIPEPWSACSTTCGPGVQVREVKCRVLLTFTQTETELPEEECEGPKLPTERPCLLEACDESPASRELDIPLPEDSETTYDWEYAGFTPCTATCLGGHQEAIAVCLHIQTQQTVNDSLCDMVHRPPAMSQACNTEPCPPRWHVGSWGPCSATCGVGIQTRDVYCLHPGETPAPPEECRDEKPHALQACNQFDCPPGWHIEEWQQCSRTCGGGTQNRRVTCRQLLTDGSFLNLSDELCQGPKASSHKSCARTDCPPHLAVGDWSKEHSMQEDNGAGSTQF

SEQ ID NO: 116 - DNA, 2316 bp, Homo sapiens
  CDS (1)...(2316)
atggcttcctggacgagcccctggtgggtgctgatagggatggtcttcatgcactctcccctcccgcagaccacagctgagaaatctcctggaaggaattgtgaagggcagaacattcggtacaagacatgcagcaatcatgactgccctccagatgcagaagatttcagagcccagcagtgctcagcctacaatgatgtccagtatcaggggcattactatgaatggcttccacgatataatgatcctgctgccccgtgtgcactcaagtgtcatgcacaaggacaaaacttggtggtggagctggcacctaaggtactggatggaactcgttgcaacacggactccttggacatgtgtatcagtggcatctgtcaggcagtgggctgcgatcggcaactgggaagcaatgccaaggaggacaactgtggagtctgtgccggcgatggctccacctgcaggcttgtacggggacaatcaaagtcacacgtttctcctgaaaaaagagaagaaaatgtaattgctgttcctttgggaagtcgaagtgtgagaattacagtgaaaggacctgcccacctctttattgaatcaaaaacacttcaaggaagcaaaggagaacacagctttaacagccccggcgtctttgtcgtagaaaacacaacagtggaatttcagaggggctccgagaggcaaacttttaagattccaggacctctgatggctgatttcatcttcaagaccaggtacactgcagccaaagacagcgtggttcagttcttcttttaccagcccatcagtcatcagtggagacaaactgacttctttccctgcactgtgacgtgtggaggaggttatcagctcaattctgctgaatgtgtggatatccgcttgaagagggtagttcctgaccattattgtcactactaccctgaaaatgtaaaaccaaaaccaaaactgaaggaatgcagcatggatccctgcccatcaagtgatggatttaaagagataatgccctatgaccacttccaacctcttcctcgctgggaacataatccttggactgcatgttccgtgtcctgtggaggagggattcagagacggagctttgtgtgtgtagaggaatccatgcatggagagatattgcaggtggaagaatggaagtgcatgtacgcacccaaacccaaggttatgcaaacttgtaatctgtttgattgccccaagtggattgccatggagtggtctcagtgcacagtgacttgtggccgagggttacggtaccgggttgttctgtgtattaaccaccgcggagagcatgttgggggctgcaatccacaactgaagttacacatcaaagaagaatgtgtcattcccatcccgtgttataaaccaaaagaaaaaagtccagtggaagcaaaattgccttggctgaaacaagcacaagaactagaagagaccagaatagcaacagaagaaccaacgttcattccagaaccctggtcagcctgcagtaccacgtgtgggccaggtgtgcaggtccgcgaggtgaagtgccgtgtgctcctcacattcacgcagactgagactgagctgcccgaggaagagtgtgaaggccccaagctgcccaccgaacggccctgcctcctggaagcatgtgatgagagcccggcctcccgagagctagacatccctctccctgaggacagtgagacgacttacgactgggagtacgctgggttcaccccttgcacagcaacatgcttgggaggccatcaagaagccatagcagtgtgcttacatatccagacccagcagacagtcaatgacagcttgtgtgatatggtccaccgtcctccagccatgagccaggcctgtaacacagagccctgtccccccaggtggcatgtgggctcttgggggccctgctcagctacctgtggagttggaattcagacccgagatgtgtactgcctgcacccaggggagacccctgcccctcctgaggagtgccgagatgaaaagccccatgctttacaagcatgcaatcagtttgactgccctcctggctggcacattgaagaatggcagcagtgttccaggacttgtggcgggggaactcagaacagaagagtcacctgtcggcagctgctaacggatggcagctttttgaatctctcagatgaattgtgccaaggacccaaggcatcgtctcacaagtcctgtgccaggacagactgtcctccacatttagctgtgggagactggtcgaaggagcattcaatgcaagaggacaatggagcaggatctacacaattctaa

SEQ ID NO: 117 - protein, 771 aa, Homo sapiens
MASWTSPWWVLIGMVFMHSPLPQTTAEKSPGRNCEGQNIRYKTCSNHDCPPDAEDFRAQQCSAYNDVQYQGHYYEWLPRYNDPAAPCALKCHAQGQNLVVELAPKVLDGTRCNTDSLDMCISGICQAVGCDRQLGSNAKEDNCGVCAGDGSTCRLVRGQSKSHVSPEKREENVIAVPLGSRSVRITVKGPAHLFIESKTLQGSKGEHSFNSPGVFVVENTTVEFQRGSERQTFKIPGPLMADFIFKTRYTAAKDSVVQFFFYQPISHQWRQTDFFPCTVTCGGGYQLNSAECVDIRLKRVVPDHYCHYYPENVKPKPKLKECSMDPCPSSDGFKEIMPYDHFQPLPRWEHNPWTACSVSCGGGIQRRSFVCVEESMHGEILQVEEWKCMYAPKPKVMQTCNLFDCPKWIAMEWSQCTVTCGRGLRYRVVLCINHRGEHVGGCNPQLKLHIKEECVIPIPCYKPKEKSPVEAKLPWLKQAQELEETRIATEEPTFIPEPWSACSTTCGPGVQVREVKCRVLLTFTQTETELPEEECEGPKLPTERPCLLEACDESPASRELDIPLPEDSETTYDWEYAGFTPCTATCLGGHQEAIAVCLHIQTQQTVNDSLCDMVHRPPAMSQACNTEPCPPRWHVGSWGPCSATCGVGIQTRDVYCLHPGETPAPPEECRDEKPHALQACNQFDCPPGWHIEEWQQCSRTCGGGTQNRRVTCRQLLTDGSFLNLSDELCQGPKASSHKSCARTDCPPHLAVGDWSKEHSMQEDNGAGSTQF

SEQ ID NO: 118 - DNA, 4854 bp, Homo sapiens
  CDS (1)...(4854)
atggcttcctggacgagcccctggtgggtgctgatagggatggtcttcatgcactctcccctcccgcagaccacagctgagaaatctcctggaaggaattgtgaagggcagaacattcggtacaagacatgcagcaatcatgactgccctccagatgcagaagatttcagagcccagcagtgctcagcctacaatgatgtccagtatcaggggcattactatgaatggcttccacgatataatgatcctgctgccccgtgtgcactcaagtgtcatgcacaaggacaaaacttggtggtggagctggcacctaaggtactggatggaactcgttgcaacacggactccttggacatgtgtatcagtggcatctgtcaggcagtgggctgcgatcggcaactgggaagcaatgccaaggaggacaactgtggagtctgtgccggcgatggctccacctgcaggcttgtacggggacaatcaaagtcacacgtttctcctgaaaaaagagaagaaaatgtaattgctgttcctttgggaagtcgaagtgtgagaattacagtgaaaggacctgcccacctctttattgaatcaaaaacacttcaaggaagcaaaggagaacacagctttaacagccccggcgtctttgtcgtagaaaacacaacagtggaatttcagaggggctccgagaggcaaacttttaagattccaggacctctgatggctgatttcatcttcaagaccaggtacactgcagccaaagacagcgtggttcagttcttcttttaccagcccatcagtcatcagtggagacaaactgacttctttccctgcactgtgacgtgtggaggaggttatcagctcaattctgctgaatgtgtggatatccgcttgaagagggtagttcctgaccattattgtcactactaccctgaaaatgtaaaaccaaaaccaaaactgaaggaatgcagcatggatccctgcccatcaagtgatggatttaaagagataatgccctatgaccacttccaacctcttcctcgctgggaacataatccttggactgcatgttccgtgtcctgtggaggagggattcagagacggagctttgtgtgtgtagaggaatccatgcatggagagatattgcaggtggaagaatggaagtgcatgtacgcacccaaacccaaggttatgcaaacttgtaatctgtttgattgccccaagtggattgccatggagtggtctcagtgcacagtgacttgtggccgagggttacggtaccgggttgttctgtgtattaaccaccgcggagagcatgttgggggctgcaatccacaactgaagttacacatcaaagaagaatgtgtcattcccatcccgtgttataaaccaaaagaaaaaagtccagtggaagcaaaattgccttggctgaaacaagcacaagaactagaagagaccagaatagcaacagaagaaccaacgttcattccagaaccctggtcagcctgcagtaccacgtgtgggccaggtgtgcaggtccgcgaggtgaagtgccgtgtgctcctcacattcacgcagactgagactgagctgcccgaggaagagtgtgaaggccccaagctgcccaccgaacggccctgcctcctggaagcatgtgatgagagcccggcctcccgagagctagacatccctctccctgaggacagtgagacgacttacgactgggagtacgctgggttcaccccttgcacagcaacatgcttgggaggccatcaagaagccatagcagtgtgcttacatatccagacccagcagacagtcaatgacagcttgtgtgatatggtccaccgtcctccagccatgagccaggcctgtaacacagagccctgtccccccaggtggcatgtgggctcttgggggccctgctcagctacctgtggagttggaattcagacccgagatgtgtactgcctgcacccaggggagacccctgcccctcctgaggagtgccgagatgaaaagccccatgctttacaagcatgcaatcagtttgactgccctcctggctggcacattgaagaatggcagcagtgttccaggacttgtggcgggggaactcagaacagaagagtcacctgtcggcagctgctaacggatggcagctttttgaatctctcagatgaattgtgccaaggacccaaggcatcgtctcacaagtcctgtgccaggacagactgtcctccacatttagctgtgggagactggtcgaagtgttctgtcagttgtggtgttggaatccagagaagaaagcaggtgtgtcaaaggctggcagccaaaggtcggcgcatccccctcagtgagatgatgtgcagggatctaccagggttccctcttgtaagatcttgccagatgcctgagtgcagtaaaatcaaatcagagatgaagacaaaacttggtgagcagggtccgcagatcctcagtgtccagagagtctacattcagacaagggaagagaagcgtattaacctgaccattggtagcagagcctatttgctgcccaacacatccgtgattattaagtgccccgtgcgacgattccagaaatctctgatccagtgggagaaggatggccgttgcctgcagaactccaaacggcttggcatcaccaagtcaggctcactaaaaatccacggtcttgctgcccccgacatcggcgtgtaccggtgcattgcaggctctgcacaggaaacagttgtgctcaagctcattggtactgacaaccggctcatcgcacgcccagccctcagggagcctatgagggaatatcctgggatggaccacagcgaagccaatagtttgggagtcacatggcacaaaatgaggcaaatgtggaataacaaaaatgacctttatctggatgatgaccacattagtaaccagcctttcttgagagctctgttaggccactgcagcaattctgcaggaagcaccaactcctgggagttgaagaataagcagtttgaagcagcagttaaacaaggagcatatagcatggatacagcccagtttgatgagctgataagaaacatgagtcagctcatggaaaccggagaggtcagcgatgatcttgcgtcccagctgatatatcagctggtggccgaattagccaaggcacagccaacacacatgcagtggcggggcatccaggaagagacacctcctgctgctcagctcagaggggaaacagggagtgtgtcccaaagctcgcatgcaaaaaactcaggcaagctgacattcaagccgaaaggacctgttctcatgaggcaaagccaacctccctcaatttcatttaataaaacaataaattccaggattggaaatacagtatacattacaaaaaggacagaggtcatcaatatactgtgtgaccttattacccccagtgaggccacatatacatggaccaaggatggaaccttgttacagccctcagtaaaaataattttggatggaactgggaagatacagatacagaatcctacaaggaaagaacaaggcatatatgaatgttctgtagctaatcatcttggttcagatgtggaaagttcttctgtgctgtatgcagaggcacctgtcatcttgtctgttgaaagaaatatcaccaaaccagagcacaaccatctgtctgttgtggttggaggcatcgtggaggcagcccttggagcaaacgtgacaatccgatgtcctgtaaaaggtgtccctcagcctaatataacttggttgaagagaggaggatctctgagtggcaatgtttccttgcttttcaatggatccctgttgttgcagaatgtttcccttgaaaatgaaggaacctacgtctgcatagccaccaatgctcttggaaaggcagtggcaacatctgtactccacttgctggaacgaagatggccagagagtagaatcgtatttctgcaaggacataaaaagtacattctccaggcaaccaacactagaaccaacagcaatgacccaacaggagaacccccgcctcaagagcctttttgggagcctggtaactggtcacattgttctgccacctgtggtcatttgggagcccgcattcagagaccccagtgtgtgatggccaatgggcaggaagtgagtgaggccctgtgtgatcacctccagaagccactggctgggtttgagccctgtaacatccgggactgcccagcgaggtggttcacaagtgtgtggtcacagtgctctgtgtcttgcggtgaaggataccacagtcggcaggtgacgtgcaagcggacaaaagccaatggaactgtgcaggtggtgtctccaagagcatgtgcccctaaagaccggcctctgggaagaaaaccatgttttggtcatccatgtgttcagtgggaaccagggaaccggtgtcctggacgttgcatgggccgtgctgtgaggatgcagcagcgtcacacagcttgtcaacacaacagctctgactccaactgtgatgacagaaagagacccaccttaagaaggaactgcacatcaggggcctgtgatgtgtgttggcacacaggcccttggaagccctgtacagcagcctgtggcaggggtttccagtctcggaaagtcgactgtatccacacaaggagttgcaaacctgtggccaagagacactgtgtacagaaaaagaaaccaatttcctggcggcactgtcttgggccctcctgtgatagagactgcacagacacaactcactactgtatgtttgtaaaacatcttaatttgtgttctctagaccgctacaaacaaaggtgctgccagtcatgtcaagagggataa

SEQ ID NO: 119 - protein, 1617 aa, Homo sapiens
MASWTSPWWVLIGMVFMHSPLPQTTAEKSPGRNCEGQNIRYKTCSNHDCPPDAEDFRAQQCSAYNDVQYQGHYYEWLPRYNDPAAPCALKCHAQGQNLVVELAPKVLDGTRCNTDSLDMCISGICQAVGCDRQLGSNAKEDNCGVCAGDGSTCRLVRGQSKSHVSPEKREENVIAVPLGSRSVRITVKGPAHLFIESKTLQGSKGEHSFNSPGVFVVENTTVEFQRGSERQTFKIPGPLMADFIFKTRYTAAKDSVVQFFFYQPISHQWRQTDFFPCTVTCGGGYQLNSAECVDIRLKRVVPDHYCHYYPENVKPKPKLKECSMDPCPSSDGFKEIMPYDHFQPLPRWEHNPWTACSVSCGGGIQRRSFVCVEESMHGEILQVEEWKCMYAPKPKVMQTCNLFDCPKWIAMEWSQCTVTCGRGLRYRVVLCINHRGEHVGGCNPQLKLHIKEECVIPIPCYKPKEKSPVEAKLPWLKQAQELEETRIATEEPTFIPEPWSACSTTCGPGVQVREVKCRVLLTFTQTETELPEEECEGPKLPTERPCLLEACDESPASRELDIPLPEDSETTYDWEYAGFTPCTATCLGGHQEAIAVCLHIQTQQTVNDSLCDMVHRPPAMSQACNTEPCPPRWHVGSWGPCSATCGVGIQTRDVYCLHPGETPAPPEECRDEKPHALQACNQFDCPPGWHIEEWQQCSRTCGGGTQNRRVTCRQLLTDGSFLNLSDELCQGPKASSHKSCARTDCPPHLAVGDWSKCSVSCGVGIQRRKQVCQRLAAKGRRIPLSEMMCRDLPGFPLVRSCQMPECSKIKSEMKTKLGEQGPQILSVQRVYIQTREEKRINLTIGSRAYLLPNTSVIIKCPVRRFQKSLIQWEKDGRCLQNSKRLGITKSGSLKIHGLAAPDIGVYRCIAGSAQETVVLKLIGTDNRLIARPALREPMREYPGMDHSEANSLGVTWHKMRQMWNNKNDLYLDDDHISNQPFLRALLGHCSNSAGSTNSWELKNKQFEAAVKQGAYSMDTAQFDELIRNMSQLMETGEVSDDLASQLIYQLVAELAKAQPTHMQWRGIQEETPPAAQLRGETGSVSQSSHAKNSGKLTFKPKGPVLMRQSQPPSISFNKTINSRIGNTVYITKRTEVINILCDLITPSEATYTWTKDGTLLQPSVKIILDGTGKIQIQNPTRKEQGIYECSVANHLGSDVESSSVLYAEAPVILSVERNITKPEHNHLSVVVGGIVEAALGANVTIRCPVKGVPQPNITWLKRGGSLSGNVSLLFNGSLLLQNVSLENEGTYVCIATNALGKAVATSVLHLLERRWPESRIVFLQGHKKYILQATNTRTNSNDPTGEPPPQEPFWEPGNWSHCSATCGHLGARIQRPQCVMANGQEVSEALCDHLQKPLAGFEPCNIRDCPARWFTSVWSQCSVSCGEGYHSRQVTCKRTKANGTVQVVSPRACAPKDRPLGRKPCFGHPCVQWEPGNRCPGRCMGRAVRMQQRHTACQHNSSDSNCDDRKRPTLRRNCTSGACDVCWHTGPWKPCTAACGRGFQSRKVDCIHTRSCKPVAKRHCVQKKKPISWRHCLGPSCDRDCTDTTHYCMFVKHLNLCSLDRYKQRCCQSCQEG

SEQ ID NO: 120 - DNA, 8578 bp, Homo sapiens
cgggctggaggccggcgtcggggaaggtcctggtgccggattccgcacgaggtgttgacgggcggcttctgccaacttctccccagcgcgcgccgagcccgcgcggccccggggctgcacgtcccagatacttctgcggcgcaaggctacaactgagacccggaggagactagaccccatggcttcctggacgagcccctggtgggtgctgatagggatggtcttcatgcactctcccctcccgcagaccacagctgagaaatctcctggagcctatttccttcccgagtttgcactttctcctcagggaagttttctggaagacacaacaggggagcagttcctcacttatcgctatgatgaccagacctcaagaaacactcgttcagatgaagacaaagatggcaactgggatgcttggggcgactggagtgactgctcccggacctgtgggggaggagcatcatattctctgcggagatgtttgactggaaggaattgtgaagggcagaacattcggtacaagacatgcagcaatcatgactgccctccagatgcagaagatttcagagcccagcagtgctcagcctacaatgatgtccagtatcaggggcattactatgaatggcttccacgatataatgatcctgctgccccgtgtgcactcaagtgtcatgcacaaggacaaaacttggtggtggagctggcacctaaggtactggatggaactcgttgcaacacggactccttggacatgtgtatcagtggcatctgtcaggcagtgggctgcgatcggcaactgggaagcaatgccaaggaggacaactgtggagtctgtgccggcgatggctccacctgcaggcttgtacggggacaatcaaagtcacacgtttctcctgaaaaaagagaagaaaatgtaattgctgttcctttgggaagtcgaagtgtgagaattacagtgaaaggacctgcccacctctttattgaatcaaaaacacttcaaggaagcaaaggagaacacagctttaacagccccggcgtctttgtcgtagaaaacacaacagtggaatttcagaggggctccgagaggcaaacttttaagattccaggacctctgatggctgatttcatcttcaagaccaggtacactgcagccaaagacagcgtggttcagttcttcttttaccagcccatcagtcatcagtggagacaaactgacttctttccctgcactgtgacgtgtggaggaggttatcagctcaattctgctgaatgtgtggatatccgcttgaagagggtagttcctgaccattattgtcactactaccctgaaaatgtaaaaccaaaaccaaaactgaaggaatgcagcatggatccctgcccatcaagtgatggatttaaagagataatgccctatgaccacttccaacctcttcctcgagctgggaacataatccttggactgcatgttccgtgtcctgtggaggagggattcagagacggagctttgtgtgtgtagaggaatccatgcatggagagatattgcaggtggaagaatggaagtgcatgtacgcacccaaacccaaggttatgcaaacttgtaatctgtttgattgccccaagtggattgccatggagtggtctcagtgcacagtgacttgtggccgagggttacggtaccgggttgttctgtgtattaaccaccgcggagagcatgttgggggctgcaatccacaactgaagttacacatcaaagaagaatgtgtcattcccatcccgtgttataaaccaaaagaaaaaagtccagtggaagcaaaattgccttggctgaaacaagcacaagaactagaagagaccagaatagcaacagaagaaccaacgttcattccagaaccctggtcagcctgcagtaccacgtgtgggccaggtgtgcaggtccgcgaggtgaagtgccgtgtgctcctcacattcacgcagactgagactgagctgcccgaggaagagtgtgaaggccccaagctgcccaccgaacggccctgcctcctggaagcatgtgatgagagcccggcctcccgagagctagacatccctctccctgaggacagtgagacgacttacgactgggagtacgctgggttcaccccttgcacagcaacatgcttgggaggccatcaagaagccatagcagtgtgcttacatatccagacccagcagacagtcaatgacagcttgtgtgatatggtccaccgtcctccagccatgagccaggcctgtaacacagagccctgtccccccaggagagagccagcagcttgtagaagcatgccgggttacataatggtcctgctagtctgaggagagccttcttctctaacaggattcaacactgctagggaagaaaggaggaaagcaagaggcaatagtgatgtgtttctgtaccagcttgttacctatttcttgatataaaaaacaattctttattgagttcattgtctgtgaataagaaattgttgcccatttcttaaataaaaacagctccatctccaaaaaaaaaaaaaaaaaatggcatgtgggctcttgggggccctgctcagctacctgtggagttggaattcagacccgagatgtgtactgcctgcacccaggggagacccctgcccctcctgaggagtgccgagatgaaaagccccatgctttacaagcatgcaatcagtttgactgccctcctggctggcacattgaagaatggcagcagtgttccaggacttgtggcgggggaactcagaacagaagagtcacctgtcggcagctgctaacggatggcagctttttgaatctctcagatgaattgtgccaaggacccaaggcatcgtctcacaagtcctgtgccaggacagactgtcctccacatttagctgtgggagactggtcgaaggagcattcaatgcaagaggacaatggagcaggatctacacaattctaaagaaaagcaagcatgactcaaggatttcctcttcatcctgtgttcttcatgtagagagacagcagagaggcagtcagagaatactgtctgataagcccttgaaaaagctgtagggccaagatgagatacagagatgactcaaaacagagaatccaggaatgcatagatcctggtaaaaaaggtgggagatgagtaataaattcatttgtgtaggattaagactaatcaactaacaattatattatagaacataacataaatatcagaaatcttgacattatctaaataataaaatgaaaactaattgagatttggagagatgaggtagatgatatagtttggctgtgtccccacccaaatctcatcttgaattgtagttcccataattcccatgtgttgtgggagggactcagttggagataattgaatcatgggggcagtttccctcatactgttctcgtggtggtaaatgagtctcacgagatctgatggttttataaggggtttcccttttcgcttggctctcattctctcttgcctgctgccatgtaagacgtccctttgcccttcctttgtcttctgccatgattgtgaggcttccctagccacgtggaactgagtctattaaacctctttcctttataacttacccagtcttgggtatgtctttattaacaacataagattggactaatacagtagaggaaatgtaagtgtgcttatttcctcatccttcttagtagcaagtcaataaatactctcctaagtcaaattgtcattaaaaataactatccaaatctcttgttggtttatttaatcttctttattaactttagagtgttctttcgggaattaatcatggtttaaaaaatatcaaacattcaacaactctaattttactttaatgtctttttttctaatatatctaataaaattgcattaaatttttaagttgaaaaaaaaaaaaaaaaaaaaatgttctgtcagttgtggtgttggaatccagagaagaaagcaggtgtgtcaaaggctggcagccaaaggtcggcgcatccccctcagtgagatgatgtgcagggatctaccagggttccctcttgtaagatcttgccagatgcctgagtgcagtaaaatcaaatcagagatgaagacaaaacttggtgagcagggtccgcagatcctcagtgtccagagagtctacattcagacaagggaagagaagcgtattaacctgaccattggtagcagagcctatttgctgcccaacacatccgtgattattaagtgccccgtgcgacgattccagaaatctctgatccagtgggagaaggatggccgttgcctgcagaactccaaacggcttggcatcaccaagtcaggctcactaaaaatccacggtcttgctgcccccgacatcggcgtgtaccggtgcattgcaggctctgcacaggaaacagttgtgctcaagctcattggtactgacaaccggctcatcgcacgcccagccctcagggagcctatgagggaatatcctgggatggaccacagcgaagccaatagtttgggagtcacatggcacaaaatgaggcaaatgtggaataacaaaaatgacctttatctggatgatgaccacattagtaaccagcctttcttgagagctctgttaggccactgcagcaattctgcaggaagcaccaactcctgggagttgaagaataagcagtttgaagcagcagttaaacaaggagcatatagcatggatacagcccagtttgatgagctgataagaaacatgagtcagctcatggaaaccggagaggtcagcgatgatcttgcgtcccagctgatatatcagctggtggccgaattagccaaggcacagccaacacacatgcagtggcggggcatccaggaagagacacctcctgctgctcagctcagaggggaaacagggagtgtgtcccaaagctcgcatgcaaaaaactcaggcaagctgacattcaagccgaaaggacctgttctcatgaggcaaagccaacctccctcaatttcatttaataaaacaataaattccaggattggaaatacagtatacattacaaaaaggacagaggtcatcaatatactgtgtgaccttattacccccagtgaggccacatatacatggaccaaggatggaaccttgttacagccctcagtaaaaataattttggatggaactgggaagatacagatacagaatcctacaaggaaagaacaaggcatatatgaatgttctgtagctaatcatcttggttcagatgtggaaagttcttctgtgctgtatgcagaggcacctgtcatcttgtctgttgaaagaaatatcaccaaaccagagcacaaccatctgtctgttgtggttggaggcatcgtggaggcagcccttggagcaaacgtgacaatccgatgtcctgtaaaaggtgtccctcagcctaatataacttggttgaagagaggaggatctctgagtggcaatgtttccttgcttttcaatggatccctgttgttgcagaatgtttcccttgaaaatgaaggaacctacgtctgcatagccaccaatgctcttggaaaggcagtggcaacatctgtactccacttgctggaacgaagatggccagagagtagaatcgtatttctgcaaggacataaaaagtacattctccaggcaaccaacactagaaccaacagcaatgacccaacaggagaacccccgcctcaagagcctttttgggagcctggtaactggtcacattgttctgccacctgtggtcatttgggagcccgcattcagagaccccagtgtgtgatggccaatgggcaggaagtgagtgaggccctgtgtgatcacctccagaagccactggctgggtttgagccctgtaacatccgggactgcccagcgaggtggttcacaagtgtgtggtcacagtgctctgtgtcttgcggtgaaggataccacagtcggcaggtgacgtgcaagcggacaaaagccaatggaactgtgcaggtggtgtctccaagagcatgtgcccctaaagaccggcctctgggaagaaaaccatgttttggtcatccatgtgttcagtgggaaccagggaaccggtgtcctggacgttgcatgggccgtgctgtgaggatgcagcagcgtcacacagcttgtcaacacaacagctctgactccaactgtgatgacagaaagagacccaccttaagaaggaactgcacatcaggggcctgtgatgtgtgttggcacacaggcccttggaagccctgtacagcagcctgtggcaggggtttccagtctcggaaagtcgactgtatccacacaaggagttgcaaacctgtggccaagagacactgtgtacagaaaaagaaaccaatttcctggcggcactgtcttgggccctcctgtgatagagactgcacagacacaactcactactgtatgtttgtaaaacatcttaatttgtgttctctagaccgctacaaacaaaggtgctgccagtcatgtcaagagggataaacctttggaggggtcatgatgctgctgtgaagataaaagtagaatataaaagctcttttccccatgtcgctgattcaaaaacatgtatttcttaaaagactagattctatggatcaaacagaggttgatgcaaaaacaccactgttaaggtgtaaagtgaaattttccaatggtagttttatattccaattttttaaaatgatgtattcaaggatgaacaaaatactatagcatgcatgccactgcacttgggacctcatcatgtcagttgaatcgagaaatcaccaagattatgagtgcatcctcacgtgctgcctctttcctgtgatatgtagactagcacagagtggtacatcctaaaaacttgggaaacacagcaacccatgacttcctcttctctcaagttgcaggttttcaacagttttataaggtatttgcattttagaagctctggccagtagttgttaagatgttggcattaatggcattttcatagatccttggtttagtctgtgaaaaagaaaccatctctctggataggctgtcacactgactgacctaagggttcatggaagcatggcatcttgtccttgcttttagaacacccatggaagaaaacacagagtagatattgctgtcatttatacaactacagaaatttatctatgacctaatgaggcatctcggaagtcaaagaagagggaaagttaaccttttctactgatttcgtagtatattcagagctttcttttaagagctgtgaatgaaactttttctaagcactattctattgcacacaaacagaaaaccaaagccttattagacctaatttatgcataaagtagtattcctgagaactttattttggaaaatttataagaaagtaatccaaataagaaacacgatagttgaaaataatttttatagtaaataattgttttgggctgatttttcagtaaatccaaagtgacttaggttagaagttacactaaggaccaggggttggaatcagaatttagtttaagatttgaggaaaagggtaagggttagtttcagttttaggattagagctagaattgggttaggtgagaaagaaagttaaggttaaggctagagttgtctttaagggttagggttaggaccaggttaggtcagggttggattgggtttagattggggccagtgctggtgttagtgatagtgtcaggatggaggttaggtttggagtaagcgttgttgctgaagtgagttcaggctagcattaaattgtaagttctgaagctgatttggttatggggtctttcccctgtatactaccagttgtgtctttagatggcacacaagtccaaataagtggtcatacttctttattcagggtctcagctgcctgtacacctgctgcctacatcttcttggcaacaaagttacctgccacaggctctgctgagcctagttcctggtcagtaataactgaacagtgcattttggctttggatgtgtctgtggacaagcttgctgagtttctctaccatattctgagcacacggtctcttttgttctaatttcagcttcactgacactgggttgagcactactgtatgtggagggtttggtgattgggaatggatgggggacagtgaggaggacacaccagcccattagttgttaatcatcaatcacatctgattgttgaaggttattaaattaaaagaaagatcatttgtaacatactctttgtatatatttattatatgaaaggtgcaatattttattttgtacagtatgtaataaagacatgggacatatatttttcttattaacaaaatttcatattaaattgcttcactttgtatttaaagttaaaagttactatttttcatttgctattgtactttcattgttgtcattcaattgacattcctgtgtactgtattttactactgtttttataacatgagagttaatgtttctgtttcatgatccttatgtaattcagaaataaatttactttgattattcagtggcatccttat

SEQ ID NO: 121 - DNA, 2115 bp, Homo sapiens
  CDS (1)...(2115)
atgatcgcccggtgccttttggctgtgcgaagcctccgcagagttggtggttccaggattttactcagaatgacgttaggaagagaagtgatgtctcctcttcaggcaatgtcttcctatactgtggctggcagaaatgttttaagatgggatctttcaccagagcaaattaaaacaagaactgaggagctcattgtgcagaccaaacaggtgtacgatgctgttggaatgctcggtattgaggaagtaacttacgagaactgtctgcaggcactggcagatgtagaagtaaagtatatagtggaaaggaccatgctagactttccccagcatgtatcctctgacaaagaagtacgagcagcaagtacagaagcagacaaaagactttctcgttttgatattgagatgagcatgagaggagatatatttgagagaattgttcatttacaggaaacctgtgatctggggaagataaaacctgaggccagacgatacttggaaaagtcaattaaaatggggaaaagaaatgggctccatcttcctgaacaagtacagaatgaaatcaaatcaatgaagaaaagaatgagtgagctatgtattgattttaacaaaaacctcaatgaggatgataccttccttgtattttccaaggctgaacttggtgctcttcctgatgatttcattgacagtttagaaaagacagatgatgacaagtataaaattaccttaaaatatccacactatttccctgtcatgaagaaatgttgtatccctgaaaccagaagaaggatggaaatggcttttaatacaaggtgcaaagaggaaaacaccataattttgcagcagctactcccactgcgaaccaaggtggccaaactactcggttatagcacacatgctgacttcgtccttgaaatgaacactgcaaagagcacaagccgcgtaacagcytttctagatgatttaagccagaagttaaaacccttgggtgaagcagaacgagagtttattttgaatttgaagaaaaaggaatgcaaagacaggggttttgaatatgatgggaaaatcaatgcctgggatctatattactacatgactcagacagaggaactcaagtattccatagaccaagagttcctcaaggaatacttcccaattgaggtggtcactgaaggcttgctgaacacctaccaggagttgttgggactttcatttgaacaaatgacagatgctcatgtttggaacaagagtgttacactttatactgtgaaggataaagctacaggagaagtattgggacagttctatttggacctctatccaagggaaggaaaatacaatcatgcggcctgcttcggtctccagcctggctgccttctgcctgatggaagccggatgatggcagtggctgccctcgtggtgaacttctcacagccagtggcaggtcgtccctctctcctgagacacgacgaggtgaggacttactttcatgagtttggtcacgtgatgcatcagatttgtgcacagactgattttgcacgatttagcggaacaaatgtggaaactgactttgtagaggtgccatcgcaaatgcttgaaaattgggtgtgggacgtcgattccctccgaagattgtcaaaacattataaagatggaagccctattgcagacgatctgcttgaaaaacttgttgcttctaggctggtcaacacaggtcttctgaccctgcgccagattgttttgagcaaagttgatcagtctcttcataccaacacatcgctggatgctgcaagtgaatatgccaaatactgctcagaaatattaggagttgcagctactccaggcacaaatatgccagctacctttggacatttggcagggggatacgatggccaatattatggatatctttggagtgaagtattttccatggatatgttttacagctgttttaaaaaagaagggataatgaatccagaggttggaatgaaatacagaaacctaatcctgaaacctgggggatctctggacggcatggacatgctccacaatttcttgaaacgtgagccaaaccaaaaagcgttcctaatgagtagaggcctgcatgctycgtga

SEQ ID NO: 122 - protein, 704 aa, Homo sapiens
  VARIANT (1)...(704): Xaa = Any Amino Acid
MIARCLLAVRSLRRVGGSRILLRMTLGREVMSPLQAMSSYTVAGRNVLRWDLSPEQIKTRTEELIVQTKQVYDAVGMLGIEEVTYENCLQALADVEVKYIVERTMLDFPQHVSSDKEVRAASTEADKRLSRFDIEMSMRGDIFERIVHLQETCDLGKIKPEARRYLEKSIKMGKRNGLHLPEQVQNEIKSMKKRMSELCIDFNKNLNEDDTFLVFSKAELGALPDDFIDSLEKTDDDKYKITLKYPHYFPVMKKCCIPETRRRMEMAFNTRCKEENTIILQQLLPLRTKVAKLLGYSTHADFVLEMNTAKSTSRVTXFLDDLSQKLKPLGEAEREFILNLKKKECKDRGFEYDGKINAWDLYYYMTQTEELKYSIDQEFLKEYFPIEVVTEGLLNTYQELLGLSFEQMTDAHVWNKSVTLYTVKDKATGEVLGQFYLDLYPREGKYNHAACFGLQPGCLLPDGSRMMAVAALVVNFSQPVAGRPSLLRHDEVRTYFHEFGHVMHQICAQTDFARFSGTNVETDFVEVPSQMLENWVWDVDSLRRLSKHYKDGSPIADDLLEKLVASRLVNTGLLTLRQIVLSKVDQSLHTNTSLDAASEYAKYCSEILGVAATPGTNMPATFGHLAGGYDGQYYGYLWSEVFSMDMFYSCFKKEGIMNPEVGMKYRNLILKPGGSLDGMDMLHNFLKREPNQKAFLMSRGLHAX

SEQ ID NO: 123 - DNA, 6306 bp, Homo sapiens
cgtgatcttggctcactgcagcctctgcctccytggttcaagcgattctcctgcttcagccacctgatgcctcagacagtggttcaaattaatacgactcactatagggagacttctttctcccatttcaggtgtcgtaagcttgaattcaataactataacggtcctaaggtagcgaagtctcagcgctcccatgatcgcccggtgccttttggctgtgcgaagcctccgcagagttggtggttccaggattttactcagaatgacgttaggaagagaagtgatgtctcctcttcaggcaatgtcttcctatactgtggctggcagaaatgttttaagatgggatctttcaccagagcaaattaaaacaagaactgaggagctcattgtgcagaccaaacaggtgtacgatgctgttggaatgctcggtattgaggaagtaacttacgagaactgtctgcaggcactggcagatgtagaagtaaagtatatagtggaaaggaccatgctagactttccccagcatgtatcctctgacaaagaagtacgagcagcaagtacagaagcagacaaaagactttctcgttttgatattgagatgagcatgagaggagatatatttgagagaattgttcatttacaggaaacctgtgatctggggaagataaaacctgaggccagacgatacttggaaaagtcaattaaaatggggaaaagaaatgggctccatcttcctgaacaagtacagaatgaaatcaaatcaatgaagaaaagaatgagtgagctatgtattgattttaacaaaaacctcaatgaggatgataccttccttgtattttccaaggctgaacttggtgctcttcctgatgatttcattgacagtttagaaaagacagatgatgacaagtataaaattaccttaaaatatccacactatttccctgtcatgaagaaatgttgtatccctgaaaccagaagaaggatggaaatggcttttaatacaaggtgcaaagaggaaaacaccataattttgcagcagctactcccactgcgaaccaaggtggccaaactactcggttatagcacacatgctgacttcgtccttgaaatgaacactgcaaagagcacaagccgcgtaacagcytttctagatgatttaagccagaagttaaaacccttgggtgaagcagaacgagagtttattttgaatttgaagaaaaaggaatgcaaagacaggggttttgaatatgatgggaaaatcaatgcctgggatctatattactacatgactcagacagaggaactcaagtattccatagaccaagagttcctcaaggaatacttcccaattgaggtggtcactgaaggcttgctgaacacctaccaggagttgttgggactttcatttgaacaaatgacagatgctcatgtttggaacaagagtgttacactttatactgtgaaggataaagctacaggagaagtattgggacagttctatttggacctctatccaagggaaggaaaatacaatcatgcggcctgcttcggtctccagcctggctgccttctgcctgatggaagccggatgatggcagtggctgccctcgtggtgaacttctcacagccagtggcaggtcgtccctctctcctgagacacgacgaggtgaggacttactttcatgagtttggtcacgtgatgcatcagatttgtgcacagactgattttgcacgatttagcggaacaaatgtggaaactgactttgtagaggtgccatcgcaaatgcttgaaaattgggtgtgggacgtcgattccctccgaagattgtcaaaacattataaagatggaagccctattgcagacgatctgcttgaaaaacttgttgcttctaggctggtcaacacaggtcttctgaccctgcgccagattgttttgagcaaagttgatcagtctcttcataccaacacatcgctggatgctgcaagtgaatatgccaaatactgctcagaaatattaggagttgcagctactccaggcacaaatatgccagctacctttggacatttggcagggggatacgatggccaatattatggatatctttggagtgaagtattttccatggatatgttttacagctgttttaaaaaagaagggataatgaatccagaggttggaatgaaatacagaaacctaatcctgaaacctgggggatctctggacggcatggacatgctccacaatttcttgaaacgtgagccaaaccaaaaagcgttcctaatgagtagaggcctgcatgctycgtgaactggggatctttggtagccgtccatgtctggaggacaagtcgacatcaccatgtgttactggcctggaaactgaagggagttttgcaagtgaaaatttagatttctattgacatccttttgttttctaattttaaaaattataaagatgtaaatggaattataaatactgtgacctaagaaaagacccactagaaagtaattgtactataaaatttcataaaactggatttgatttctttttatgaaagtttcatatgaatgtaacttgattttttactattataatctagataatatgatataagagggctaagaatttttaaattgaatcatatatatgatataatttgatccttcttgtatcttgaagttttgtacttgggatttctggactgataaatgaatcatcacattcttctggtaaatattttcttggagctctgtgtcaactttgatcctttgtctcccaggaaggtgtgacctctcctttgcctgcatacctcaaggccaggggaatatgcctcagtgatgcatttatctttgtatatcaggccgcatgattcccaactttctgccacacttaaattacgttcctccatttcagttttgtcttttctgtctaaagttcagtcaaagagtatcaaaaaattatgtttcagctagactggtgtaatgtataagtttttgtatcttgtattagaggatttcgtagcttttattagaggctcatttccacctcagcatacaagatcgttagtcttttggcatgtgtgccaattagaatactaaagcaagtccaagcacatttttctcttctcacgtttctaataagtgttagggactttgcctcttttacttaccacgtccccaaaagtgtcaggtagacatgtcacaaatggctctgtagagagccatgggaagagagaggaggtggatgtggaacataaagggttcagaaactccagaagaggagtgggttttggatagaagcatttgaggacagctgctccaaagccttatgtgtatgatgaaacttaaccacggggaagagactcttcagtagcctgttctgtctggtgatttttattttaagtgaacctttggatctatctttaactctctttattgtgagtctaaattccaattctgcagcagatcagtaaactcacagtatttttcctgtggaaatctattcaataaggaaaccaagacaggataataaaatttaaaaaaaaaacaactttgaattcccctgcctaggtcttccagttgttttccagcgcatacctcaggtatgactttgctagccggggacaaaattagcaccttccgattctctagtccaaatgaactttgtgctaaataaaaaattattatactacataataaagttacagatagcaggaaatgcaagagctaggagattcctagattatatctgccaagcaaataccttaaacatccacctgaaatcctactaccccctcttctgagataatttgcccagcccttctcttcccacacactcactcaatgtcacccccttctaatccccaaaactgtttttgtggtctttgtagcctatagtagttttctcacatctttccccctagacttttctgtttttcagtttcagacaaaaaaactcttcagctttttccagtgtgtctccttaacagtaactttaccacttgaaatcttatttcatagaaaaactaaattggtgtggaaaggctgcacacaataaagttatattattatccatgaaaatgaactcatatttctttcatactttaacgttaaaaccgaaatgcatgagagcaaaagcaccatggtgttctttctatttagggcctacctctaatatttaaaatctaccaaagagcagtcacaaaattaaaactcagcccgggcgcagtggctcatgcctgtaatcccagcactttgggaggccaaggcaggaggatcacctgaggtcagagttcaagaccagcatggtcaacatggtgaaaccctgtctctacaaaaatacaaaaagctgggcatgatgttgggttcctgtagtcccagctacttaggaggctgaggcaggagaatagcttgaacccgggaggtggaggttgcagtgagctgagatcatgccattgcactccagcctggacgacagagtgagattcagtctcaaaaaaaattaatactcaaagaattatctagcataatttaaaagaaaggactttttaaaaattctctagcataattcaaaagaaaggacttaacttttttttttttttagtgtggtcatccgtctagttgttctttttttccagatcagagcagagaatatcactgacatgcttgaaatggtggataactatgtaaattgtaattggacaaatgtacactttagatttatggactgagccacatataataaggtctctcctggtaattgatccaggggatttaggcctctttcgggttttttgttttttttttaggcattgttatgttgtgaaggataaaatcttcaacatcttatgcaaatggatagtaggcatgatcctaaaggtttagttttacgatgctgcagagaagagaaatgtcttgacgttttgccacctgatgtagactttgtccccctctagtataaatgttgcatgttacctagataaacaactaaaaattgccttgagttatcacctgagctacttatgccaaggtcttgcctttctaaagctaataaggtgagaggtggatatctgtagctcttcggatgaaaaattgcattgtgggagataccaaaattgaggaaatagctcttcaaagaaaaattactgatatgatcattgtacttgtaaatgccttaagtagcaggcagtgactcaattttctactttaccattttacctttagcttttatgtatgaattataggtctgtggagattctgcctccccactaggccagtgtgtgtttaccatttattcattttctatcatacacaggtggattaaaatttacattaaaatttacattaaaataccatcatacttcaggcttctataacaaaatatcagactgggtggcttcaaaagcagacatttcttacagttctggaagctgggaagtcccacaatccacatgctggtaaatttggttcgtggtgaggcccctcttcctcttttactgaccacatccccaaaagtgtcaggtagacatgttacaaatagctctgtagagagccatgggaagagacaggaggcagatgtggaacataaagggtttagaaacttctgcaggcagcagtggcagggagcaagccctagagtgtctctttttacgagagcaggaatcccatcatgagagttccttcctcatgactttatctaaacccagtcacccccaacaaaggccccaccccctaaccccatcacattggctgttacggcttcaatgtaggggatggggcacaaacattcagtccataacgaatactgattcctcaaatagggtttaaacatagttaactgagcccccaaagaatgttaaaagagaaaatccattttatttgaatagatgcagtgaccacagcttcttccctcaaatcaacacattacagttagatgtctcccatctgaaattggatagcccactgaaattgaacatgccttctcttataaatgtgtggtgagaataaaagcaacaaagaaatgaatgtggtggctcacacctgtaatcctaacactttggaaggttgaggcaggaggatcctttgtgctcaagagtttgagaccagcctgagcaacacagtgagaccctgtctctacaaaaactaaaaaaattagctagggatggtggcacatgcctgtagtcccagctacttgggaggctgaggtgggaggattgcttgagcccaagaaggtcaaggctgccatgagccataatcacgccactgcactccagcctgggtgacagagaccctgtcttaaaataaaat

SEQ ID NO: 124 - DNA, 1041 bp, Homo sapiens
  CDS (1)...(1041)
atgggccctgctggctgtgccttcacgctgctccttctgctggggatctcagtgtgtgggcaacctgtatactccagccgcgttgtaggtggccaggatgctgctgcagggcgctggccttggcaggtcagcctacactttgaccacaactttatctatggaggttccctcgtcagtgagaggttgatactgacagcagcacactgcatacaaccgacctggactactttttcatatactgtgtggctaggatcgattacagtaggtgactcaaggaaacgtgtgaagtactacgtgtccaaaatcgtcatccatcccaagtaccaagatacaacggcagacrtcgccttgttgaaactgtcctctcaagtcaccttcacttctgccatcctgcctatttgcttgcccagtgtcacaaagcagttggcaattccacccttttgttgggtgaccggatggggaaaagttaaggaaagttcagatagagattaccattctgcccttcaggaagcagaagtacccattattgaccgccaggcttgtgaacagctctacaatcccatcggtatcttcttgccagcactggagccagtcatcaaggaagacaagatttgtgctggtgatactcaaaacatgaaggatagttgcaagggtgattctggagggcctctgtcgtgtcacattgatggtgtatggatccagacaggagtagtaagctggggattagaatgtggtaaatctcttcctggagtctacaccaatgtaatctactaccaaaaatggattaatgccactatttcaagagccaacaatctagacttctctgacttcttgttccctattgtcctactctctctggctctcctgygtccctcctgtgcctttggacctaacactatacacagagtaggcactgtagctgaagctgttgcttgcatacagggctgggaagagaatgcatggagatttagtcccaggggcagagaactcacaggagagccactgctaaccctgggtgactttatttacaatttgaaatga

SEQ ID NO: 125 - protein, 346 aa, Homo sapiens
  VARIANT (1)...(346): Xaa = Any Amino Acid
MGPAGCAFTLLLLLGISVCGQPVYSSRVVGGQDAAAGRWPWQVSLHFDHNFIYGGSLVSERLILTAAHCIQPTWTTFSYTVWLGSITVGDSRKRVKYYVSKIVIHPKYQDTTADXALLKLSSQVTFTSAILPICLPSVTKQLAIPPFCWVTGWGKVKESSDRDYHSALQEAEVPIIDRQACEQLYNPIGIFLPALEPVIKEDKICAGDTQNMKDSCKGDSGGPLSCHIDGVWIQTGVVSWGLECGKSLPGVYTNVIYYQKWINATISRANNLDFSDFLFPIVLLSLALLXPSCAFGPNTIHRVGTVAEAVACIQGWEENAWRFSPRGRELTGEPLLTLGDFIYNLK

SEQ ID NO: 126 - DNA, 1286 bp, Homo sapiens
ctgcagctgcacttctgaagtctggtcccttcaggatctggcagcgggtgaagaccaaaggagaggagggggtgaagcagaggaatccatctaggagaagctagttctggcagctccccattggcctcttcctgggagcctgagtccaggaagcaggaagcgctcactggctctgaggacagagacatgggccctgctggctgtgccttcacgctgctccttctgctggggatctcagtgtgtgggcaacctgtatactccagccgcgttgtaggtggccaggatgctgctgcagggcgctggccttggcaggtcagcctacactttgaccacaactttatctatggaggttccctcgtcagtgagaggttgatactgacagcagcacactgcatacaaccgacctggactactttttcatatactgtgtggctaggatcgattacagtaggtgactcaaggaaacgtgtgaagtactacgtgtccaaaatcgtcatccatcccaagtaccaagatacaacggcagacrtcgccttgttgaaactgtcctctcaagtcaccttcacttctgccatcctgcctatttgcttgcccagtgtcacaaagcagttggcaattccacccttttgttgggtgaccggatggggaaaagttaaggaaagttcagatagagattaccattctgcccttcaggaagcagaagtacccattattgaccgccaggcttgtgaacagctctacaatcccatcggtatcttcttgccagcactggagccagtcatcaaggaagacaagatttgtgctggtgatactcaaaacatgaaggatagttgcaagggtgattctggagggcctctgtcgtgtcacattgatggtgtatggatccagacaggagtagtaagctggggattagaatgtggtaaatctcttcctggagtctacaccaatgtaatctactaccaaaaatggattaatgccactatttcaagagccaacaatctagacttctctgacttcttgttccctattgtcctactctctctggctctcctgygtccctcctgtgcctttggacctaacactatacacagagtaggcactgtagctgaagctgttgcttgcatacagggctgggaagagaatgcatggagatttagtcccaggggcagagaactcacaggagagccactgctaaccctgggtgactttatttacaatttgaaatgattttgtttttaaggtttttgattttggaagttttggggttggaaagtgaagagttaaga

SEQ ID NO: 127 - DNA, 1395 bp, Homo sapiens
  CDS (1)...(1395)
atggtgcgcctggcggccgagctgctgctgctgctggggctgctgctgctcacgctgcacatcaccgtgctgcgcggctcgggagccgccgacgggcccgacgcggccgcgggcaacgccagccaagcccagctgcagaataacctcaacgtgggaagtgacaccacatcagaaaccagcttttctctctccaaagaagcaccaagggagcatctggaccaccaggctgcacaccaacccttccccagaccgcgattccgacaagagacggggcacccttcattgcaaagagatttccccagatcctttctccttgatctaccaaactttccagatctttccaaagctgatatcaatgggcagrwtccaaatatccaggtcaccatagaggtggtcgacggtcctgactctgaagcagataaagatcagcatccggagaataagcccagctggtcagtcccatcccccgactggcgggcctggtggcagaggtccctgtccttggccagggcaaacagcggggaccaggactacragtacgacagtacctcagacgacagcaacttcctcaacccccccagggggtgggaccatacagccccaggccaccggacttttgaaaccaaagatcagccagaatatgattccacagatggcgagggtgactggagtctctggtctgtctgcagcgtcacctgcgggaacggcaaccagaaacggacccggtcttgtggctacgcgtgcactgcaacagaatcgaggacctgtgaccgtccaaactgcccaggaattgaagacacttttaggacagctgccaccgaagtgagtctgcttgcgggaagcgaggagtttaatgccaccaaactgtttgaagttgacacagacagctgtgagcgctggatgagctgcaaaagcgagttcttaaagaagtacatgcacaaggtgatgaatgacctgcccagctgcccctgctcctaccccactgaggtggcctacagcacggccgacatcttcgaccgcatcaagcgcaaggacttccgctggaaggacgccagcgggcccaaggagaagctggagatctacaagcccactgcccggtactgcatccgctccatgctgtccctggagagcaccacgctggcggcacagcactgctgctacggcgacaacatgcagctcatcaccaggggcaagggggcgggcacgcccaacctcatcagcaccgagttctccgcggagctccactacaaggtggacgtcctgccctggattatctgcaagggtgactggagcaggtataacgaggcccggcctcccaacaacggacagaagtgcacagagagcccctcggacgaggactacatcaagcagttccaagaggccagggaatattaa

SEQ ID NO: 128 - protein, 464 aa, Homo sapiens
  VARIANT (1)...(464): Xaa = Any Amino Acid
MVRLAAELLLLLGLLLLTLHITVLRGSGAADGPDAAAGNASQAQLQNNLNVGSDTTSETSFSLSKEAPREHLDHQAAHQPFPRPRFRQETGHPSLQRDFPRSFLLDLPNFPDLSKADINGQXPNIQVTIEVVDGPDSEADKDQHPENKPSWSVPSPDWRAWWQRSLSLARANSGDQDYXYDSTSDDSNFLNPPRGWDHTAPGHRTFETKDQPEYDSTDGEGDWSLWSVCSVTCGNGNQKRTRSCGYACTATESRTCDRPNCPGIEDTFRTAATEVSLLAGSEEFNATKLFEVDTDSCERWMSCKSEFLKKYMHKVMNDLPSCPCSYPTEVAYSTADIFDRIKRKDFRWKDASGPKEKLEIYKPTARYCIRSMLSLESTTLAAQHCCYGDNMQLITRGKGAGTPNLISTEFSAELHYKVDVLPWIICKGDWSRYNEARPPNNGQKCTESPSDEDYIKQFQEAREY

SEQ ID NO: 129 - DNA, 495 bp, Homo sapiens
  CDS (1)...(495)
atgagctgcaaaagcgagttcttaaagaagtacatgcacaaggtgatgaatgacctgcccagctgcccctgctcctaccccactgaggtggcctacagcacggccgacatcttcgaccgcatcaagcgcaaggacttccgctggaaggacgccagcgggcccaaggagaagctggagatctacaagcccactgcccggtactgcatccgctccatgctgtccctggagagcaccacgctggcggcacagcactgctgctacggcgacaacatgcagctcatcaccaggggcaagggggcgggcacgcccaacctcatcagcaccgagttctccgcggagctccactacaaggtggacgtcctgccctggattatctgcaagggtgactggagcaggtataacgaggcccggcctcccaacaacggacagaagtgcacagagagcccctcggacgaggactacatcaagcagttccaagaggccagggaatattaa

SEQ ID NO: 130 - protein, 164 aa, Homo sapiens [sequence omitted]

SEQ ID NO: 131 - DNA, 936 bp, Homo sapiens
  CDS (1)...(936)
atggtgcgcctggcggccgagctgctgctgctgctggggctgctgctgctcacgctgcacatcaccgtgctgcgcggctcgggagccgccgacgggcccgacgcggccgcgggcaacgccagccaagcccagctgcagaataacctcaacgtgggaagtgacaccacatcagaaaccagcttttctctctccaaagaagcaccaagggagcatctggaccaccaggctgcacaccaacccttccccagaccgcgattccgacaagagacggggcacccttcattgcaaagagatttccccagatcctttctccttgatctaccaaactttccagatctttccaaagctgatatcaatgggcagrwtccaaatatccaggtcaccatagaggtggtcgacggtcctgactctgaagcagataaagatcagcatccggagaataagcccagctggtcagtcccatcccccgactggcgggcctggtggcagaggtccctgtccttggccagggcaaacagcggggaccaggactacragtacgacagtacctcagacgacagcaacttcctcaacccccccagggggtgggaccatacagccccaggccaccggacttttgaaaccaaagatcagccagaatatgattccacagatggcgagggtgactggagtctctggtctgtctgcagcgtcacctgcgggaacggcaaccagaaacggacccggtcttgtggctacgcgtgcactgcaacagaatcgaggacctgtgaccgtccaaactgcccaggaattgaagacacttttaggacagctgccaccgaagtgagtctgcttgcgggaagcgaggagtttaatgccaccaaactgtttgaagttgtgctcccagcatgtgtcttgcttgctgaatatacttcaagcaagagaaaacagtcctaa

SEQ ID NO: 132 - protein, 311 aa, Homo sapiens
  VARIANT (1)...(311): Xaa = Any Amino Acid
MVRLAAELLLLLGLLLLTLHITVLRGSGAADGPDAAAGNASQAQLQNNLNVGSDTTSETSFSLSKEAPREHLDHQAAHQPFPRPRFRQETGHPSLQRDFPRSFLLDLPNFPDLSKADINGQXPNIQVTIEVVDGPDSEADKDQHPENKPSWSVPSPDWRAWWQRSLSLARANSGDQDYXYDSTSDDSNFLNPPRGWDHTAPGHRTFETKDQPEYDSTDGEGDWSLWSVCSVTCGNGNQKRTRSCGYACTATESRTCDRPNCPGIEDTFRTAATEVSLLAGSEEFNATKLFEVVLPACVLLAEYTSSKRKQS

SEQ ID NO: 133 - DNA, 1476 bp, Homo sapiens
  CDS (1)...(1476)
atgaagccccgcgcgcgcggatggcggggcttggcggcgctgtggatgctgttggcgcaggtggccgagcaggcacctgcgtgcgccatgggacccgcagcggcagcgcctgggagcccgagcgtcccgcgtcctcctccacccgcggagcggccgggctggatggaaaagggcgaatatgacctggtctctgcctacgaggttgaccacaggggcgattacgtgtcccatgaaatcatgcaccatcagcggcggagaagagcagtggccgtgtccgaggttgagtctcttcaccttcggctgaaaggctccaggcacgacttccacgtggatctgaggacttccagcagcctagtggctcctggctttattgtgcagacgttgggaaagacaggcactaagtctgtgcagactttaccgccagaggacttctgtttctatcaaggctctttgcgatcacacagaaactcctcagtggccctttcaacctgccaaggcttgtcaggcatgatacgaacagaagaggcagattacttcctaaggccacttccttcacacctctcatggaaactcggcagagctgcccaaggcagctcgccatcccacgtactgtacaagagatccacagagccccatgctcctggggccagtgaggtcctggtgacctcaaggacatgggagctggcacatcaacccctgcacagcagcgaccttcgcctgggactgccacaaaagcagcatttctgtggaagacgcaagaaatacatgccccagcctcccaaggaagacctcttcatcttgccagatgagtataagtcttgcttacggcataagcgctctcttctgaggtcccatagaaatgaagaactgaacgtggagaccttggtggtggtcgacaaaaagatgatgcaaaaccatggccatgaaaatatcaccacctacgtgctcacgatactcaacatggtatctgctttattcaaagatggaacaataggaggaaacatcaacattgcaattgtaggtctgattcttctagaagatgaacagccaggactggtgataagtcaccacgcagaccacaccttaagtagcttctgccagtggcagtctggattgatggggaaagatgggactcgtcatgaccacgccatcttactgactggtctggatatatgttcctggaagaatgagccctgtgacactttgggatttgcacccataagtggaatgtgtagtaaatatcgcagctgcacgattaatgaagatacaggtcttggactggccttcaccattgcccatgagtctggacacaactttggcatgattcatgatggagaagggaacatgtgtaaaaagtccgagggcaacatcatgtcccctacattggcaggacgcaatggagtcttctcctggtcaccctgcagccgccagtatctacacaaatttctaagatcagtgaaaatgccagctctctga

SEQ ID NO: 134 - protein, 491 aa, Homo sapiens
MKPRARGWRGLAALWMLLAQVAEQAPACAMGPAAAAPGSPSVPRPPPPAERPGWMEKGEYDLVSAYEVDHRGDYVSHEIMHHQRRRRAVAVSEVESLHLRLKGSRHDFHVDLRTSSSLVAPGFIVQTLGKTGTKSVQTLPPEDFCFYQGSLRSHRNSSVALSTCQGLSGMIRTEEADYFLRPLPSHLSWKLGRAAQGSSPSHVLYKRSTEPHAPGASEVLVTSRTWELAHQPLHSSDLRLGLPQKQHFCGRRKKYMPQPPKEDLFILPDEYKSCLRHKRSLLRSHRNEELNVETLVVVDKKMMQNHGHENITTYVLTILNMVSALFKDGTIGGNINIAIVGLILLEDEQPGLVISHHADHTLSSFCQWQSGLMGKDGTRHDHAILLTGLDICSWKNEPCDTLGFAPISGMCSKYRSCTINEDTGLGLAFTIAHESGHNFGMIHDGEGNMCKKSEGNIMSPTLAGRNGVFSWSPCSRQYLHKFLRSVKMPAL

SEQ ID NO: 135 - DNA, 3675 bp, Homo sapiens
  CDS (1)...(3675)
atgaagccccgcgcgcgcggatggcggggcttggcggcgctgtggatgctgctggcgcaggtggccgagcaggcacctgcgtgcgccatgggacccgcagcggcagcgcctgggagcccgagcgtcccgcgtcctcctccacccgcggagcggccgggctggatggaaaagggcgaatatgacctggtctctgcctacgaggttgaccacaggggcgattacgtgtcccatgaaatcatgcaccatcagcggcggagaagagcagtggccgtgtccgaggttgagtctcttcaccttcggctgaaaggctccaggcacgacttccacgtggatctgaggacttccagcagcctagtggctcctggctttattgtgcagacgttgggaaagacaggcactaagtctgtgcagactttaccgccagaggacttctgtttctatcaaggctctttgcgatcacacagaaactcctcagtggccctttcaacctgccaaggcttgtcaggcatgatacgaacagaagaggcagattacttcctaaggccacttccttcacacctctcatggaaactcggcagagctgcccaaggcagctcgccatcccacgtactgtacaagagatccacagagccccatgctcctggggccagtgaggtcctggtgacctcaaggacatgggagctggcacatcaacccctgcacagcagcgaccttcgcctgggactgccacaaaagcagcatttctgtggaagacgcaagaaatacatgccccagcctcccaaggaagacctcttcatcttgccagatgagtataagtcttgcttacggcataagcgctctcttctgaggtcccatagaaatgaagaactgaacgtggagaccttggtggtggtcgacaaaaagatgatgcaaaaccatggccatgaaaatatcaccacctacgtgctcacgatactcaacatggtatctgctttattcaaagatggaacaataggaggaaacatcaacattgcaattgtaggtctgattcttctagaagatgaacagccaggactggtgataagtcaccacgcagaccacaccttaagtagcttctgccagtggcagtctggattgatggggaaagatgggactcgtcatgaccacgccatcttactgactggtctggatatatgttcctggaagaatgagccctgtgacactttgggatttgcacccataagtggaatgtgtagtaaatatcgcagctgcacgattaatgaagatacaggtcttggactggccttcaccattgcccatgagtctggacacaactttggcatgattcatgatggagaagggaacatgtgtaaaaagtccgagggcaacatcatgtcccctacattggcaggacgcaatggagtcttctcctggtcaccctgcagccgccagtatctacacaaatttctaagcaccgctcaagctatctgccttgctgatcagccaaagcctgtgaaggaatacaagtatcctgagaaattgccaggagaattatatgatgcaaacacacagtgcaagtggcagttcggagagaaagccaagctctgcatgctggactttaaaaaggacatctgtaaagccctgtggtgccatcgtattggaaggaaatgtgagactaaatttatgccagcagcagaaggcacaatttgtgggcatgacatgtggtgccggggaggacagtgtgtgaaatatggtgatgaaggccccaagcccacccatggccactggtcggactggtcttcttggtccccatgctccaggacctgcggagggggagtatctcataggagtcgcctctgcaccaaccccaagccatcgcatggagggaagttctgtgagggctccactcgcactctgaagctctgcaacagtcagaaatgtccccgggacagtgttgacttccgtgctgctcagtgtgccgagcacaacagcagacgattcagagggcggcactacaagtggaagccttacactcaagtagaagatcaggacttatgcaaactctactgtatcgcagaaggatttgatttcttcttttctttgtcaaataaagtcaaagatgggactccatgctcggaggatagccgtaatgtttgtatagatgggatatgtgagagagttggatgtgacaatgtccttggatctgatgctgttgaagacgtctgtggggtgtgtaacgggaataactcagcctgcacgattcacaggggtctctacaccaagcaccaccacaccaaccagtattatcacatggtcaccattccttctggagcccggagtatccgcatctatgaaatgaacgtctctacctcctacatttctgtgcgcaatgccctcagaaggtactacctgaatgggcactggaccgtggactggcccggccggtacaaattttcgggcactactttcgactacagacggtcctataatgagcccgagaacttaatcgctactggaccaaccaacgagacactgattgtggagctgctgtttcagggaaggaacccgggtgttgcctgggaatactccatgcctcgcttggggaccgagaagcagccccctgcccagcccagctacacttgggccatcgtgcgctctgagtgctccgtgtcctgcggagggggacagatgaccgtgagagagggctgctacagagacctgaagtttcaagtaaatatgtccttctgcaatcccaagacacgacctgtcacggggctggtgccttgcaaagtatctgcctgtcctcccagctggtccgtggggaactggagtgcctgcagtcggacgtgtggcgggggtgcccagagccgccccgtgcagtgcacacggcgggtgcactatgactcggagccagtcccggccagcctgtgccctcagcctgctccctccagcaggcaggcctgcaactctcagagctgcccacctgcatggagcgccgggccctgggcagagtgctcacacacctgtgggaaggggtggaggaagcgggcagtggcctgtaagagcaccaacccctcggccagagcgcagctgctgcccgacgctgtctgcacctccgagcccaagcccaggatgcatgaagcctgtctgcttcagcgctgccacaagcccaagaagctgcagtggctggtgtccgcctggtcccagtgctctgtgacatgtgaaagaggaacacagaaaagattcttaaaatgtgctgaaaagtatgtttctggaaagtatcgagagctggcctcaaagaagtgctcacatttgccgaagcccagcctggagctggaacgtgcctgcgccccgcttccatgccccaggcaccccccatttgctgctgcgggaccctcgaggggcagctggtttgcctcaccctggtctcagtgcacggccagctgtgggggaggcgttcagacgaggtccgtgcagtgcctggctgggggccggccggcctcaggctgcctcctgcaccagaagccttcggcctccctggcctgcaacactcacttctgccccattgcagagaagaaagatgccttctgcaaagactacttccactggtgctacctggtaccccagcacgggatgtgcagccacaagttctacggcaagcagtgctgcaagacttgctctaagtccaacttgtga

SEQ ID NO: 136 - protein, 1224 aa, Homo sapiens
MKPRARGWRGLAALWMLLAQVAEQAPACAMGPAAAAPGSPSVPRPPPPAERPGWMEKGEYDLVSAYEVDHRGDYVSHEIMHHQRRRRAVAVSEVESLHLRLKGSRHDFHVDLRTSSSLVAPGFIVQTLGKTGTKSVQTLPPEDFCFYQGSLRSHRNSSVALSTCQGLSGMIRTEEADYFLRPLPSHLSWKLGRAAQGSSPSHVLYKRSTEPHAPGASEVLVTSRTWELAHQPLHSSDLRLGLPQKQHFCGRRKKYMPQPPKEDLFILPDEYKSCLRHKRSLLRSHRNEELNVETLVVVDKKMMQNHGHENITTYVLTILNMVSALFKDGTIGGNINIAIVGLILLEDEQPGLVISHHADHTLSSFCQWQSGLMGKDGTRHDHAILLTGLDICSWKNEPCDTLGFAPISGMCSKYRSCTINEDTGLGLAFTIAHESGHNFGMIHDGEGNMCKKSEGNIMSPTLAGRNGVFSWSPCSRQYLHKFLSTAQAICLADQPKPVKEYKYPEKLPGELYDANTQCKWQFGEKAKLCMLDFKKDICKALWCHRIGRKCETKFMPAAEGTICGHDMWCRGGQCVKYGDEGPKPTHGHWSDWSSWSPCSRTCGGGVSHRSRLCTNPKPSHGGKFCEGSTRTLKLCNSQKCPRDSVDFRAAQCAEHNSRRFRGRHYKWKPYTQVEDQDLCKLYCIAEGFDFFFSLSNKVKDGTPCSEDSRNVCIDGICERVGCDNVLGSDAVEDVCGVCNGNNSACTIHRGLYTKHHHTNQYYHMVTIPSGARSIRIYEMNVSTSYISVRNALRRYYLNGHWTVDWPGRYKFSGTTFDYRRSYNEPENLIATGPTNETLIVELLFQGRNPGVAWEYSMPRLGTEKQPPAQPSYTWAIVRSECSVSCGGGQMTVREGCYRDLKFQVNMSFCNPKTRPVTGLVPCKVSACPPSWSVGNWSACSRTCGGGAQSRPVQCTRRVHYDSEPVPASLCPQPAPSSRQACNSQSCPPAWSAGPWAECSHTCGKGWRKRAVACKSTNPSARAQLLPDAVCTSEPKPRMHEACLLQRCHKPKKLQWLVSAWSQCSVTCERGTQKRFLKCAEKYVSGKYRELASKKCSHLPKPSLELERACAPLPCPRHPPFAAAGPSRGSWFASPWSQCTASCGGGVQTRSVQCLAGGRPASGCLLHQKPSASLACNTHFCPIAEKKDAFCKDYFHWCYLVPQHGMCSHKFYGKQCCKTCSKSNL

SEQ ID NO: 137 - DNA, 4042 bp, Homo sapiens
ccttcccgcgctctgcttgggtcgggtcctccctgcccgctcgcacgctgccggccggggaccctccggtggcccctagcccctcggagcgctcctggatgaagccccgcgcgcgcggatggcggggcttggcggcgctgtggatgctgctggcgcaggtggccgagcaggcacctgcgtgcgccatgggacccgcagcggcagcgcctgggagcccgagcgtcccgcgtcctcctccacccgcggagcggccgggctggatggaaaagggcgaatatgacctggtctctgcctacgaggttgaccacaggggcgattacgtgtcccatgaaatcatgcaccatcagcggcggagaagagcagtggccgtgtccgaggttgagtctcttcaccttcggctgaaaggctccaggcacgacttccacgtggatctgaggacttccagcagcctagtggctcctggctttattgtgcagacgttgggaaagacaggcactaagtctgtgcagactttaccgccagaggacttctgtttctatcaaggctctttgcgatcacacagaaactcctcagtggccctttcaacctgccaaggcttgtcaggcatgatacgaacagaagaggcagattacttcctaaggccacttccttcacacctctcatggaaactcggcagagctgcccaaggcagctcgccatcccacgtactgtacaagagatccacagagccccatgctcctggggccagtgaggtcctggtgacctcaaggacatgggagctggcacatcaacccctgcacagcagcgaccttcgcctgggactgccacaaaagcagcatttctgtggaagacgcaagaaatacatgccccagcctcccaaggaagacctcttcatcttgccagatgagtataagtcttgcttacggcataagcgctctcttctgaggtcccatagaaatgaagaactgaacgtggagaccttggtggtggtcgacaaaaagatgatgcaaaaccatggccatgaaaatatcaccacctacgtgctcacgatactcaacatggtatctgctttattcaaagatggaacaataggaggaaacatcaacattgcaattgtaggtctgattcttctagaagatgaacagccaggactggtgataagtcaccacgcagaccacaccttaagtagcttctgccagtggcagtctggattgatggggaaagatgggactcgtcatgaccacgccatcttactgactggtctggatatatgttcctggaagaatgagccctgtgacactttgggatttgcacccataagtggaatgtgtagtaaatatcgcagctgcacgattaatgaagatacaggtcttggactggccttcaccattgcccatgagtctggacacaactttggcatgattcatgatggagaagggaacatgtgtaaaaagtccgagggcaacatcatgtcccctacattggcaggacgcaatggagtcttctcctggtcaccctgcagccgccagtatctacacaaatttctaagcaccgctcaagctatctgccttgctgatcagccaaagcctgtgaaggaatacaagtatcctgagaaattgccaggagaattatatgatgcaaacacacagtgcaagtggcagttcggagagaaagccaagctctgcatgctggactttaaaaaggacatctgtaaagccctgtggtgccatcgtattggaaggaaatgtgagactaaatttatgccagcagcagaaggcacaatttgtgggcatgacatgtggtgccggggaggacagtgtgtgaaatatggtgatgaaggccccaagcccacccatggccactggtcggactggtcttcttggtccccatgctccaggacctgcggagggggagtatctcataggagtcgcctctgcaccaaccccaagccatcgcatggagggaagttctgtgagggctccactcgcactctgaagctctgcaacagtcagaaatgtccccgggacagtgttgacttccgtgctgctcagtgtgccgagcacaacagcagacgattcagagggcggcactacaagtggaagccttacactcaagtagaagatcaggacttatgcaaactctactgtatcgcagaaggatttgatttcttcttttctttgtcaaataaagtcaaagatgggactccatgctcggaggatagccgtaatgtttgtatagatgggatatgtgagagagttggatgtgacaatgtccttggatctgatgctgttgaagacgtctgtggggtgtgtaacgggaataactcagcctgcacgattcacaggggtctctacaccaagcaccaccacaccaaccagtattatcacatggtcaccattccttctggagcccggagtatccgcatctatgaaatgaacgtctctacctcctacatttctgtgcgcaatgccctcagaaggtactacctgaatgggcactggaccgtggactggcccggccggtacaaattttcgggcactactttcgactacagacggtcctataatgagcccgagaacttaatcgctactggaccaaccaacgagacactgattgtggagctgctgtttcagggaaggaacccgggtgttgcctgggaatactccatgcctcgcttggggaccgagaagcagccccctgcccagcccagctacacttgggccatcgtgcgctctgagtgctccgtgtcctgcggagggggacagatgaccgtgagagagggctgctacagagacctgaagtttcaagtaaatatgtccttctgcaatcccaagacacgacctgtcacggggctggtgccttgcaaagtatctgcctgtcctcccagctggtccgtggggaactggagtgcctgcagtcggacgtgtggcgggggtgcccagagccgccccgtgcagtgcacacggcgggtgcactatgactcggagccagtcccggccagcctgtgccctcagcctgctccctccagcaggcaggcctgcaactctcagagctgcccacctgcatggagcgccgggccctgggcagagtgctcacacacctgtgggaaggggtggaggaagcgggcagtggcctgtaagagcaccaacccctcggccagagcgcagctgctgcccgacgctgtctgcacctccgagcccaagcccaggatgcatgaagcctgtctgcttcagcgctgccacaagcccaagaagctgcagtggctggtgtccgcctggtcccagtgctctgtgacatgtgaaagaggaacacagaaaagattcttaaaatgtgctgaaaagtatgtttctggaaagtatcgagagctggcctcaaagaagtgctcacatttgccgaagcccagcctggagctggaacgtgcctgcgccccgcttccatgccccaggcaccccccatttgctgctgcgggaccctcgaggggcagctggtttgcctcaccctggtctcagtgcacggccagctgtgggggaggcgttcagacgaggtccgtgcagtgcctggctgggggccggccggcctcaggctgcctcctgcaccagaagccttcggcctccctggcctgcaacactcacttctgccccattgcagagaagaaagatgccttctgcaaagactacttccactggtgctacctggtaccccagcacgggatgtgcagccacaagttctacggcaagcagtgctgcaagacttgctctaagtccaacttgtgagttgggaccgctctccgtagcagagaaagtgcctgcgtggcacagaaatttcccacaaatgagctgtgcaatctacgtcggaatacatccaaggaagagcaaagccaaaagaagaaaaccgtgttaggctctttgaccaggagtgtatgtatgtgtttcactgtgagcctgggtgcagacctgtgtccccatgcacacagtgtctcctgtcaggctgaaatgtggcaccctggcagacagagctgtggctcgtgaggcagaaggcaggc

SEQ ID NO: 138 - DNA, 1356 bp, Homo sapiens
  CDS (1)...(1356)
atggctccactccgcgcgctgctgtcctacctgctgcctttgcactgtgcgctctgcgccgccgcgggcagccggaccccagagctgcacctctctggaaagctcagtgactatggtgtgacagtgccctgcagcacagactttcggggacgcttcctctcccacgtggtgtctggcccagcagcagcctctgcagggagcatggtagtggacacgccacccacactaccacgacactccagtcacctccgggtggctcgcagccctctgcacccaggagggaccctgtggcctggcagggtggggcgccactccctctacttcaatgtcactgttttcgggaaggaactgcacttgcgcctgcggcccaatcggaggttggtagtgccaggatcctcagtggagtggcaggaggattttcgggagctgttccggcagcccttacggcaggagtgtgtgtacactggaggtgtcactggaatgcctggggcagctgttgccatcagcaactgtgacggattggcgggcctcatccgcacagacagcaccgacttcttcattgagcctctggagcggggccagcaggagaaggaggccagcgggaggacacatgtggtgtaccgccgggaggccgtccagcaggagtgggcagaacctgacggggacctgcacaatgaagcctttggcctgggagaccttcccaacctgctgggcctggtgggggaccagctgggcgacacagagcggaagcggcggcatgccaagccaggcagctacagcatcgaggtgctgctggtggtggacgactcggtggttcgcttccatggcaaggagcatgtgcagaactatgtcctcaccctcatgaatatcgtagatgagatttaccacgatgagtccctgggggttcatataaatattgccctcgtccgcttgatcatggttggctaccgacagtccctgagcctgatcgagcgcgggaacccctcacgcagcctggagcaggtgtgtcgctgggcacactcccagcagcgccaggaccccagccacgctgagcaccatgaccacgttgtgttcctcacccggcaggactttgggccctcagggtatgcacccgtcactggcatgtgtcaccccctgaggagctgtgccctcaaccatgaggatggcttctcctcagccttcgtgatagctcatgagaccggccacgtgctcggcatggagcatgacggtcaggggaatggctgtgcagatgagaccagcctgggcagcgtcatggcgcccctggtgcaggctgccttccaccgcttccattggtcccgctgcagcaagctggagctcagccgctacctcccgtag

SEQ ID NO: 139 - protein, 451 aa, Homo sapiens
MAPLRALLSYLLPLHCALCAAAGSRTPELHLSGKLSDYGVTVPCSTDFRGRFLSHVVSGPAAASAGSMVVDTPPTLPRHSSHLRVARSPLHPGGTLWPGRVGRHSLYFNVTVFGKELHLRLRPNRRLVVPGSSVEWQEDFRELFRQPLRQECVYTGGVTGMPGAAVAISNCDGLAGLIRTDSTDFFIEPLERGQQEKEASGRTHVVYRREAVQQEWAEPDGDLHNEAFGLGDLPNLLGLVGDQLGDTERKRRHAKPGSYSIEVLLVVDDSVVRFHGKEHVQNYVLTLMNIVDEIYHDESLGVHINIALVRLIMVGYRQSLSLIERGNPSRSLEQVCRWAHSQQRQDPSHAEHHDHVVFLTRQDFGPSGYAPVTGMCHPLRSCALNHEDGFSSAFVIAHETGHVLGMEHDGQGNGCADETSLGSVMAPLVQAAFHRFHWSRCSKLELSRYLP

SEQ ID NO: 140 - DNA, 894 bp, Homo sapiens
  CDS (1)...(894)
atggctccactccgcgcgctgctgtcctacctgctgcctttgcactgtgcgctctgcrccgccgcgggcagccggaccccagagctgcacctctctggaaagctcagtgactatggtgtgacagtgccctgcagcacagactttcggggacgcttcctctcccacgtggtgtctggcccagcagcagcctctgcagggagcatggtagtggacacgccacccacactaccacgacactccagtcacctccgggtggctcgcagccctctgcacccaggagggaccctgtggcctggcagggtggggcgccactccctctacttcaatgtcactgttttcgggaaggaactgcacttgcgcctgcggcccaatcggaggttggtagtgccaggatcctcagtggagtggcaggaggattttcgggagctgttccggcagcccttacggcaggagtgtgtgtacactggaggtgtcactggaatgcctggggcagctgttgccatcagcaactgtgacggattggcgggcctcatccgcacagacagcaccgacttcttcattgagcctctggagcggggccagcaggagaaggaggccagcgggaggacacatgtggtgtaccgccgggaggccgtccagcaggagtgggcagaacctgacggggacctgcacaatgaagcctttggcctgggagaccttcccaacctgctgggcctggtgggggaccagctgggcgacacagagcggaagcggcggcatgccaagccaggcagctacagcatcgaggtgctgctggtggtggacgactcggtggttcgcttccatggcaaggagcatgtgcagaactatgtcctcaccctcatgaatatcgtgtgcttacagggaagtccataa

SEQ ID NO: 141 - protein, 297 aa, Homo sapiens
  VARIANT (1)...(297): Xaa = Any Amino Acid
MAPLRALLSYLLPLHCALCXAAGSRTPELHLSGKLSDYGVTVPCSTDFRGRFLSHVVSGPAAASAGSMVVDTPPTLPRHSSHLRVARSPLHPGGTLWPGRVGRHSLYFNVTVFGKELHLRLRPNRRLVVPGSSVEWQEDFRELFRQPLRQECVYTGGVTGMPGAAVAISNCDGLAGLIRTDSTDFFIEPLERGQQEKEASGRTHVVYRREAVQQEWAEPDGDLHNEAFGLGDLPNLLGLVGDQLGDTERKRRHAKPGSYSIEVLLVVDDSVVRFHGKEHVQNYVLTLMNIVCLQGSP

SEQ ID NO: 142 - DNA, 1461 bp, Homo sapiens
  CDS (1)...(1461)
atggctccactccgcgcgctgctgtcctacctgctgcctttgcactgtgcgctctgcrccgccgcgggcagccggaccccagagctgcacctctctggaaagctcagtgactatggtgtgacagtgccctgcagcacagactttcggggacgcttcctctcccacgtggtgtctggcccagcagcagcctctgcagggagcatggtagtggacacgccacccacactaccacgacactccagtcacctccgggtggctcgcagccctctgcacccaggagggaccctgtggcctggcagggtggggcgccactccctctacttcaatgtcactgttttcgggaaggaactgcacttgcgcctgcggcccaatcggaggttggtagtgccaggatcctcagtggagtggcaggaggattttcgggagctgttccggcagcccttacggcaggagtgtgtgtacactggaggtgtcactggaatgcctggggcagctgttgccatcagcaactgtgacggattggcgggcctcatccgcacagacagcaccgacttcttcattgagcctctggagcggggccagcaggagaaggaggccagcgggaggacacatgtggtgtaccgccgggaggccgtccagcaggagtgggcagaacctgacggggacctgcacaatgaagcctttggcctgggagaccttcccaacctgctgggcctggtgggggaccagctgggcgacacagagcggaagcggcggcatgccaagccaggcagctacagcatcgaggtgctgctggtggtggacgactcggtggttcgcttccatggcaaggagcatgtgcagaactatgtcctcaccctcatgaatatcgtagatgagatttaccacgatgagtccctgggggttcatataaatattgccctcgtccgcttgatcatggttggctaccgacagtccctgagcctgatcgagcgcgggaacccctcacgcagcctggagcaggtgtgtcgctgggcacactcccagcagcgccaggaccccagccacgctgagcaccatgaccacgttgtgttcctcacccggcaggactttgggccctcagggtatgcacccgtcactggcatgtgtcaccccctgaggagctgtgccctcaaccatgaggatggcttctcctcagccttcgtgatagctcatgagaccggccacgtgctcggcatggagcatgacggtcaggggaatggctgtgcagatgagaccagcctgggcagcgtcatggcgcccctggtgcaggctgccttccaccgcttccattggtcccgctgcagcaagctggagctcagccgctacctcccctcctacgactgcctcctcgatgacccctttgatcctgccacctgcccgggcggccgctcgagccctatagtgagtcgtattaggatggccgccactccctttacttaa

SEQ ID NO: 143 - protein, 486 aa, Homo sapiens
  VARIANT (1)...(486): Xaa = Any Amino Acid
MAPLRALLSYLLPLHCALCXAAGSRTPELHLSGKLSDYGVTVPCSTDFRGRFLSHVVSGPAAASAGSMVVDTPPTLPRHSSHLRVARSPLHPGGTLWPGRVGRHSLYFNVTVFGKELHLRLRPNRRLVVPGSSVEWQEDFRELFRQPLRQECVYTGGVTGMPGAAVAISNCDGLAGLIRTDSTDFFIEPLERGQQEKEASGRTHVVYRREAVQQEWAEPDGDLHNEAFGLGDLPNLLGLVGDQLGDTERKRRHAKPGSYSIEVLLVVDDSVVRFHGKEHVQNYVLTLMNIVDEIYHDESLGVHINIALVRLIMVGYRQSLSLIERGNPSRSLEQVCRWAHSQQRQDPSHAEHHDHVVFLTRQDFGPSGYAPVTGMCHPLRSCALNHEDGFSSAFVIAHETGHVLGMEHDGQGNGCADETSLGSVMAPLVQAAFHRFHWSRCSKLELSRYLPSYDCLLDDPFDPATCPGGRSSPIVSRIRMAATPFT

SEQ ID NO: 144 - DNA, 3669 bp, Homo sapiens
  CDS (1)...(3669)
atggctccactccgcgcgctgctgtcctacctgctgcctttgcactgtgcgctctgcrccgccgcgggcagccggaccccagagctgcacctctctggaaagctcagtgactatggtgtgacagtgccctgcagcacagactttcggggacgcttcctctcccacgtggtgtctggcccagcagcagcctctgcagggagcatggtagtggacacgccacccacactaccacgacactccagtcacctccgggtggctcgcagccctctgcacccaggagggaccctgtggcctggcagggtggggcgccactccctctacttcaatgtcactgttttcgggaaggaactgcacttgcgcctgcggcccaatcggaggttggtagtgccaggatcctcagtggagtggcaggaggattttcgggagctgttccggcagcccttacggcaggagtgtgtgtacactggaggtgtcactggaatgcctggggcagctgttgccatcagcaactgtgacggattggcgggcctcatccgcacagacagcaccgacttcttcattgagcctctggagcggggccagcaggagaaggaggccagcgggaggacacatgtggtgtaccgccgggaggccgtccagcaggagtgggcagaacctgacggggacctgcacaatgaagcctttggcctgggagaccttcccaacctgctgggcctggtgggggaccagctgggcgacacagagcggaagcggcggcatgccaagccaggcagctacagcatcgaggtgctgctggtggtggacgactcggtggttcgcttccatggcaaggagcatgtgcagaactatgtcctcaccctcatgaatatcgtagatgagatttaccacgatgagtccctgggggttcatataaatattgccctcgtccgcttgatcatggttggctaccgacagtccctgagcctgatcgagcgcgggaacccctcacgcagcctggagcaggtgtgtcgctgggcacactcccagcagcgccaggaccccagccacgctgagcaccatgaccacgttgtgttcctcacccggcaggactttgggccctcagggtatgcacccgtcactggcatgtgtcaccccctgaggagctgtgccctcaaccatgaggatggcttctcctcagccttcgtgatagctcatgagaccggccacgtgctcggcatggagcatgacggtcaggggaatggctgtgcagatgagaccagcctgggcagcgtcatggcgcccctggtgcaggctgccttccaccgcttccattggtcccgctgcagcaagctggagctcagccgctacctcccctcctacgactgcctcctcgatgacccctttgatcctgcctggccccagcccccagagctgcctgggatcaactactcaatggatgagcagtgccgctttgactttggcagtggctaccagacctgcttggcattcaggacctttgagccctgcaagcagctgtggtgcagccatcctgacaaccmgtayttctgcaagaccaagaaggggcccccgctggatgggactgagtgtgcacccggcaagtggtgcttcaaaggtcactgcatctggaagtcgccggagcagacatatggccaggatggaggctggagctcctggaccaagtttgggtcatgttcgcggtcatgtgggggcggggtgcgatcccgcagccggagctgcaacaacccctccccagcctatggaggccgccygtgcttagggcccatgttcgagtaccaggtctgcaacagcgaggagtgccctgggacctacgaggacttccgggcccagcagtgtgccaagcgcaactcstactatgtgcaccagaatgccaagcacagstgggtgccctacgagcctgacgatgacgcccagaagtgtgagctgatctgccagtcggcggacacrggggacgtggtgttcatgaaccaggtggttcacgatgggacacgctgcagctaccgggacccatacagcgtctgtgcgcgtggcgagtgtgtgcctgtcggctgtgacaaggaggtggggtccatgaaggcggatgacaagtgtggagtctgcgggggtgacaactcccactgcaggactgtgaaggggacgctgggcaaggcctccaagcaggcaggagctctcaagctggtgcagatcccagcaggtgccaggcacatccagattgaggcactggagaagtccccccaccgswywgtggtgaagaaccaggtcaccggcagcttcatcctcaaccccaagggcaaggaagccacaagccggaccttcaccgccatgggcctggagtgggaggatgcggtggaggatgccaaggaaagcctcaagaccagcgggcccctgcctgaagccattgccatcctggctctccccccaactgagggtggcccccgcagcagcctggcctacaagtacgtcatccatgaggacctgctgccccttatcgggagcaacaatgtgctcctggaggagatggacacctatgagtgggcgctcaagagctgggccccctgcagcaaggcctgtggaggagggatccagttcaccaaatacggctgccggcgcagacgagaccaccacatggtgcagcgacacctgtgtgaccacaagaagaggcccaagcccatccgccggcgctgcaaccagcacccgtgctctcagcctgtgtgggtgacggaggagtggggtgcctgcagccggagctgtgggaagctgggggtgcagacacgggggatacagtgcctgctgcccctctccaatggaacccacaaggtcatgccggccaaagcctgcgccggggaccggcctgaggcccgacggccctgtctccgagtgccctgcccagcccagtggaggctgggagcctggtcccagtgctctgccacctgtggagagggcatccagcagcggcaggtggtgtgcaggaccaacgccaacagcctcgggcattgcgagggggataggccagacactgtccaggtctgcarcctgcccgcctgtggaggaaatcaccagaactccacggtgagggccgatgtctgggaacttgggacgccagaggggcagtgggtgccacaatctgracccctacatcccattaacaagatatcatcaatgtgtgcagcggagccctgcacgggagacaggtctgtcttctgccagatggaagtgctcgatcgctactgctccattcccggctaccaccggctctgctgtgtgtcctgcatcaagaaggcctcgggccccaaccctggcccagaccctggcccaacctcactgccccccttctccactcctggaagccccttaccaggaccccaggaccctgcagatgctgcagagcctcctggaaagccaacgggatcagaggaccatcagcatggccgagccacacagctcccaggagctctggatacaagctccccagggacccagcatccctttgcccctgagacaccaatccctggagcatcctggagcatctcccctaccacccccggggggctgccttggggctggactcagacacctacgccagtccctgaggacaaagggcaacctggagaagacctgagacctgcccgggcggccgctcgagccctatag

SEQ ID NO: 145 - protein, 1222 aa, Homo sapiens
  VARIANT (1)...(1222): Xaa = Any Amino Acid
MAPLRALLSYLLPLHCALCXAAGSRTPELHLSGKLSDYGVTVPCSTDFRGRFLSHVVSGPAAASAGSMVVDTPPTLPRHSSHLRVARSPLHPGGTLWPGRVGRHSLYFNVTVFGKELHLRLRPNRRLVVPGSSVEWQEDFRELFRQPLRQECVYTGGVTGMPGAAVAISNCDGLAGLIRTDSTDFFIEPLERGQQEKEASGRTHVVYRREAVQQEWAEPDGDLHNEAFGLGDLPNLLGLVGDQLGDTERKRRHAKPGSYSIEVLLVVDDSVVRFHGKEHVQNYVLTLMNIVDEIYHDESLGVHINIALVRLIMVGYRQSLSLIERGNPSRSLEQVCRWAHSQQRQDPSHAEHHDHVVFLTRQDFGPSGYAPVTGMCHPLRSCALNHEDGFSSAFVIAHETGHVLGMEHDGQGNGCADETSLGSVMAPLVQAAFHRFHWSRCSKLELSRYLPSYDCLLDDPFDPAWPQPPELPGINYSMDEQCRFDFGSGYQTCLAFRTFEPCKQLWCSHPDNXYFCKTKKGPPLDGTECAPGKWCFKGHCIWKSPEQTYGQDGGWSSWTKFGSCSRSCGGGVRSRSRSCNNPSPAYGGRXCLGPMFEYQVCNSEECPGTYEDFRAQQCAKRNXYYVHQNAKHXWVPYEPDDDAQKCELICQSADXGDVVFMNQVVHDGTRCSYRDPYSVCARGECVPVGCDKEVGSMKADDKCGVCGGDNSHCRTVKGTLGKASKQAGALKLVQIPAGARHIQIEALEKSPHXXVVKNQVTGSFILNPKGKEATSRTFTAMGLEWEDAVEDAKESLKTSGPLPEAIAILALPPTEGGPRSSLAYKYVIHEDLLPLIGSNNVLLEEMDTYEWALKSWAPCSKACGGGIQFTKYGCRRRRDHHMVQRHLCDHKKRPKPIRRRCNQHPCSQPVWVTEEWGACSRSCGKLGVQTRGIQCLLPLSNGTHKVMPAKACAGDRPEARRPCLRVPCPAQWRLGAWSQCSATCGEGIQQRQVVCRTNANSLGHCEGDRPDTVQVCXLPACGGNHQNSTVRADVWELGTPEGQWVPQSXPLHPINKISSMCAAEPCTGDRSVFCQMEVLDRYCSIPGYHRLCCVSCIKKASGPNPGPDPGPTSLPPFSTPGSPLPGPQDPADAAEPPGKPTGSEDHQHGRATQLPGALDTSSPGTQHPFAPETPIPGASWSISPTTPGGLPWGWTQTPTPVPEDKGQPGEDLRPARAAARAL

SEQ ID NO: 146 - DNA, 3660 bp, Homo sapiens
  CDS (1)...(3660)
atggctccactccgcgcgctgctgtcctacctgctgcctttgcactgtgcgctctgcrccgccgcgggcagccggaccccagagctgcacctctctggaaagctcagtgactatggtgtgacagtgccctgcagcacagactttcggggacgcttcctctcccacgtggtgtctggcccagcagcagcctctgcagggagcatggtagtggacacgccacccacactaccacgacactccagtcacctccgggtggctcgcagccctctgcacccaggagggaccctgtggcctggcagggtggggcgccactccctctacttcaatgtcactgttttcgggaaggaactgcacttgcgcctgcggcccaatcggaggttggtagtgccaggatcctcagtggagtggcaggaggattttcgggagctgttccggcagcccttacggcaggagtgtgtgtacactggaggtgtcactggaatgcctggggcagctgttgccatcagcaactgtgacggattggcgggcctcatccgcacagacagcaccgacttcttcattgagcctctggagcggggccagcaggagaaggaggccagcgggaggacacatgtggtgtaccgccgggaggccgtccagcaggagtgggcagaacctgacggggacctgcacaatgaagcctttggcctgggagaccttcccaacctgctgggcctggtgggggaccagctgggcgacacagagcggaagcggcggcatgccaagccaggcagctacagcatcgaggtgctgctggtggtggacgactcggtggttcgcttccatggcaaggagcatgtgcagaactatgtcctcaccctcatgaatatcgtagatgagatttaccacgatgagtccctgggggttcatataaatattgccctcgtccgcttgatcatggttggctaccgacagtccctgagcctgatcgagcgcgggaacccctcacgcagcctggagcaggtgtgtcgctgggcacactcccagcagcgccaggaccccagccacgctgagcaccatgaccacgttgtgttcctcacccggcaggactttgggccctcagggtatgcacccswywctggcatgtgtcaccccctgaggagctgtgccctcaaccatgaggatggcttctcctcagccttcgtgatagctcatgagaccggccacgtgctcggcatggagcatgacggtcaggggaatggctgtgcagatgagaccagcctgggcagcgtcatggcgcccctggtgcaggctgccttccaccgcttccattggtcccgctgcagcaagctggagctcagccgctacctcccctcctacgactgcctcctcgatgacccctttgatcctgcctggccccagcccccagagctgcctgggatcaactactcaatggatgagcagtgccgctttgactttggcagtggctaccagacctgcttggcattcaggacctttgagccctgcaagcagctgtggtgcagccatcctgacaaccmgtayttctgcaagaccaagaaggggcccccgctggatgggactgagtgtgcacccggcaagtggtgcttcaaaggtcactgcatctggaagtcgccggagcagacatatggccaggatggaggctggagctcctggaccaagtttgggtcatgttcgcggtcatgtgggggcggggtgcgatcccgcagccggagctgcaacaacccctccccagcctatggaggccgccygtgcttagggcccatgttcgagtaccaggtctgcaacagcgaggagtgccctgggacctacgaggacttccgggcccagcagtgtgccaagcgcaactcstactatgtgcaccagaatgccaagcacagstgggtgccctacgagcctgacgatgacgcccagaagtgtgagctgatctgccagtcggcggacacrggggacgtggtgttcatgaaccaggtggttcacgatgggacacgctgcagctaccgggacccatacagcgtctgtgcgcgtggcgagtgtgtgcctgtcggctgtgacaaggaggtggggtccatgaaggcggatgacaagtgtggagtctgcgggggtgacaactcccactgcaggactgtgaaggggacgctgggcaaggcctccaagcaggcaggagctctcaagctggtgcagatcccagcaggtgccaggcacatccagattgaggcactggagaagtccccccaccgswywgtggtgaagaaccaggtcaccggcagcttcatcctcaaccccaagggcaaggaagccacaagccggaccttcaccgccatgggcctggagtgggaggatgcggtggaggatgccaaggaaagcctcaagaccagcgggcccctgcctgaagccattgccatcctggctctccccccaactgagggtggcccccgcagcagcctggcctacaagtacgtcatccatgaggacctgctgccccttatcgggagcaacaatgtgctcctggaggagatggacacctatgagtgggcgctcaagagctgggccccctgcagcaaggcctgtggaggagggatccagttcaccaaatacggctgccggcgcagacgagaccaccacatggtgcagcgacacctgtgtgaccacaagaagaggcccaagcccatccgccggcgctgcaaccagcacccgtgctctcagcctgtgtgggtgacggaggagtggggtgcctgcagccggagctgtgggaagctgggggtgcagacacgggggatacagtgcctgctgcccctctccaatggaacccacaaggtcatgccggccaaagcctgcgccggggaccggcctgaggcccgacggccctgtctccgagtgccctgcccagcccagtggaggctgggagcctggtcccagtgctctgccacctgtggagagggcatccagcagcggcaggtggtgtgcaggaccaacgccaacagcctcgggcattgcgagggggataggccagacactgtccaggtctgcarcctgcccgcctgtggaggaaatcaccagaactccacggtgagggccgatgtctgggaacttgggacgccagaggggcagtgggtgccacaatctgracccctacatcccattaacaagatatcatcaacggagccctgcacgggagacaggtctgtcttctgccagatggaagtgctcgatcgctactgctccattcccggctaccaccggctctgctgtgtgtcctgcatcaagaaggcctcgggccccaaccctggcccagaccctggcccaacctcactgccccccttctccactcctggaagccccttaccaggaccccaggaccctgcagatgctgcagagcctcctggaaagccaacgggatcagaggaccatcagcatggccgagccacacagctcccaggagctctggatacaagctccccagggacccagcatccctttgcccctgagacaccaatccctggagcatcctggagcatctcccctaccacccccggggggctgccttggggctggactcagacacctacgccagtccctgaggacaaagggcaacctggagaagacctgagacctgcccgggcggccgctcgagccctatag

SEQ ID NO: 147 - protein, 1219 aa, Homo sapiens
  VARIANT (1)...(1219): Xaa = Any Amino Acid
MAPLRALLSYLLPLHCALCXAAGSRTPELHLSGKLSDYGVTVPCSTDFRGRFLSHVVSGPAAASAGSMVVDTPPTLPRHSSHLRVARSPLHPGGTLWPGRVGRHSLYFNVTVFGKELHLRLRPNRRLVVPGSSVEWQEDFRELFRQPLRQECVYTGGVTGMPGAAVAISNCDGLAGLIRTDSTDFFIEPLERGQQEKEASGRTHVVYRREAVQQEWAEPDGDLHNEAFGLGDLPNLLGLVGDQLGDTERKRRHAKPGSYSIEVLLVVDDSVVRFHGKEHVQNYVLTLMNIVDEIYHDESLGVHINIALVRLIMVGYRQSLSLIERGNPSRSLEQVCRWAHSQQRQDPSHAEHHDHVVFLTRQDFGPSGYAPXXGMCHPLRSCALNHEDGFSSAFVIAHETGHVLGMEHDGQGNGCADETSLGSVMAPLVQAAFHRFHWSRCSKLELSRYLPSYDCLLDDPFDPAWPQPPELPGINYSMDEQCRFDFGSGYQTCLAFRTFEPCKQLWCSHPDNXYFCKTKKGPPLDGTECAPGKWCFKGHCIWKSPEQTYGQDGGWSSWTKFGSCSRSCGGGVRSRSRSCNNPSPAYGGRXCLGPMFEYQVCNSEECPGTYEDFRAQQCAKRNXYYVHQNAKHXWVPYEPDDDAQKCELICQSADXGDVVFMNQVVHDGTRCSYRDPYSVCARGECVPVGCDKEVGSMKADDKCGVCGGDNSHCRTVKGTLGKASKQAGALKLVQIPAGARHIQIEALEKSPHXXVVKNQVTGSFILNPKGKEATSRTFTAMGLEWEDAVEDAKESLKTSGPLPEAIAILALPPTEGGPRSSLAYKYVIHEDLLPLIGSNNVLLEEMDTYEWALKSWAPCSKACGGGIQFTKYGCRRRRDHHMVQRHLCDHKKRPKPIRRRCNQHPCSQPVWVTEEWGACSRSCGKLGVQTRGIQCLLPLSNGTHKVMPAKACAGDRPEARRPCLRVPCPAQWRLGAWSQCSATCGEGIQQRQVVCRTNANSLGHCEGDRPDTVQVCXLPACGGNHQNSTVRADVWELGTPEGQWVPQSXPLHPINKISSTEPCTGDRSVFCQMEVLDRYCSIPGYHRLCCVSCIKKASGPNPGPDPGPTSLPPFSTPGSPLPGPQDPADAAEPPGKPTGSEDHQHGRATQLPGALDTSSPGTQHPFAPETPIPGASWSISPTTPGGLPWGWTQTPTPVPEDKGQPGEDLRPARAAARAL

SEQ ID NO: 148 - DNA, 3651 bp, Homo sapiens
  CDS (1)...(3651)
atggctccactccgcgcgctgctgtcctacctgctgcctttgcactgtgcgctctgcrccgccgcgggcagccggaccccagagctgcacctctctggaaagctcagtgactatggtgtgacagtgccctgcagcacagactttcggggacgcttcctctcccacgtggtgtctggcccagcagcagcctctgcagggagcatggtagtggacacgccacccacactaccacgacactccagtcacctccgggtggctcgcagccctctgcacccaggagggaccctgtggcctggcagggtggggcgccactccctctacttcaatgtcactgttttcgggaaggaactgcacttgcgcctgcggcccaatcggaggttggtagtgccaggatcctcagtggagtggcaggaggattttcgggagctgttccggcagcccttacggcaggagtgtgtgtacactggaggtgtcactggaatgcctggggcagctgttgccatcagcaactgtgacggattggcgggcctcatccgcacagacagcaccgacttcttcattgagcctctggagcggggccagcaggagaaggaggccagcgggaggacacatgtggtgtaccgccgggaggccgtccagcaggagtgggcagaacctgacggggacctgcacaatgaagcctttggcctgggagaccttcccaacctgctgggcctggtgggggaccagctgggcgacacagagcggaagcggcggcatgccaagccaggcagctacagcatcgaggtgctgctggtggtggacgactcggtggttcgcttccatggcaaggagcatgtgcagaactatgtcctcaccctcatgaatatcgtagatgagatttaccacgatgagtccctgggggttcatataaatattgccctcgtccgcttgatcatggttggctaccgacagtccctgagcctgatcgagcgcgggaacccctcacgcagcctggagcaggtgtgtcgctgggcacactcccagcagcgccaggaccccagccacgctgagcaccatgaccacgttgtgttcctcacccggcaggactttgggccctcagggtatgcacccgtcactggcatgtgtcaccccctgaggagctgtgccctcaaccatgaggatggcttctcctcagccttcgtgatagctcatgagaccggccacgtgctcggcatggagcatgacggtcaggggaatggctgtgcagatgagaccagcctgggcagcgtcatggcgcccctggtgcaggctgccttccaccgcttccattggtcccgctgcagcaagctggagctcagccgctacctcccctcctacgactgcctcctcgatgacccctttgatcctgcctggccccagcccccagagctgcctgggatcaactactcaatggatgagcagtgccgctttgactttggcagtggctaccagacctgcttggcattcaggacctttgagccctgcaagcagctgtggtgcagccatcctgacaaccmgtayttctgcaagaccaagaaggggcccccgctggatgggactgagtgtgcacccggcaagtggtgcttcaaaggtcactgcatctggaagtcgccggagcagacatatggccaggatggaggctggagctcctggaccaagtttgggtcatgttcgcggtcatgtgggggcggggtgcgatcccgcagccggagctgcaacaacccctccccagcctatggaggccgccygtgcttagggcccatgttcgagtaccaggtctgcaacagcgaggagtgccctgggacctacgaggacttccgggcccagcagtgtgccaagcgcaactcstactatgtgcaccagaatgccaagcacagstgggtgccctacgagcctgacgatgacgcccagaagtgtgagctgatctgccagtcggcggacacrggggacgtggtgttcatgaaccaggtggttcacgatgggacacgctgcagctaccgggacccatacagcgtctgtgcgcgtggcgagtgtgtgcctgtcggctgtgacaaggaggtggggtccatgaaggcggatgacaagtgtggagtctgcgggggtgacaactcccactgcaggactgtgaaggggacgctgggcaaggcctccaagcaggcaggagctctcaagctggtgcagatcccagcaggtgccaggcacatccagattgaggcactggagaagtccccccaccgswywgtggtgaagaaccaggtcaccggcagcttcatcctcaaccccaagggcaaggaagccacaagccggaccttcaccgccatgggcctggagtgggaggatgcggtggaggatgccaaggaaagcctcaagaccagcgggcccctgcctgaagccattgccatcctggctctccccccaactgagggtggcccccgcagcagcctggcctacaagtacgtcatccatgaggacctgctgccccttatcgggagcaacaatgtgctcctggaggagatggacacctatgagtgggcgctcaagagctgggccccctgcagcaaggcctgtggaggagggatccagttcaccaaatacggctgccggcgcagacgagaccaccacatggtgcagcgacacctgtgtgaccacaagaagaggcccaagcccatccgccggcgctgcaaccagcacccgtgctctcagcctgtgtgggtgacggaggagtggggtgcctgcagccggagctgtgggaagctgggggtgcagacacgggggatacagtgcctgctgcccctctccaatggaacccacaaggtcatgccggccaaagcctgcgccggggaccggcctgaggcccgacggccctgtctccgagtgccctgcccagcccagtggaggctgggagcctggtcccagtgctctgccacctgtggagagggcatccagcagcggcaggtggtgtgcaggaccaacgccaacagcctcgggcattgcgagggggataggccagacactgtccaggtctgcarcctgcccgcctgtggaggaaatcaccagaactccacggtgagggccgatgtctgggaacttgggacgccagaggggcagtgggtgccacaatctgracccctacatcccattaacaagatatcatcaatgtgtgcagcggagccctgcacgggagacaggtctgtcttctgccagatggaagtgctcgatcgctactgctccattcccggctaccaccggctctgctgtgtgtcctgcatcaagaaggcctcgggccccaaccctggcccagaccctggcccaacctcactgccccccttctccactcctggaagccccttaccaggaccccaggaccctgcagatgctgcagagcctcctggaaagccaacgggatcagaggaccatcagcatggccgagccacacagctcccaggagctctggatacaagctccccagggacccagcatccctttgcccctgagacaccaatccctggagcatcctggagcatctcccctaccacccccggggggctgccttggggctggactcagacacctacgccagtccctgacctgcccgggcggccgctcgagccctatagtgagtcgtattag

SEQ ID NO: 149 - protein, 1216 aa, Homo sapiens
  VARIANT (1)...(1216): Xaa = Any Amino Acid
MAPLRALLSYLLPLHCALCXAAGSRTPELHLSGKLSDYGVTVPCSTDFRGRFLSHVVSGPAAASAGSMVVDTPPTLPRHSSHLRVARSPLHPGGTLWPGRVGRHSLYFNVTVFGKELHLRLRPNRRLVVPGSSVEWQEDFRELFRQPLRQECVYTGGVTGMPGAAVAISNCDGLAGLIRTDSTDFFIEPLERGQQEKEASGRTHVVYRREAVQQEWAEPDGDLHNEAFGLGDLPNLLGLVGDQLGDTERKRRHAKPGSYSIEVLLVVDDSVVRFHGKEHVQNYVLTLMNIVDEIYHDESLGVHINIALVRLIMVGYRQSLSLIERGNPSRSLEQVCRWAHSQQRQDPSHAEHHDHVVFLTRQDFGPSGYAPVTGMCHPLRSCALNHEDGFSSAFVIAHETGHVLGMEHDGQGNGCADETSLGSVMAPLVQAAFHRFHWSRCSKLELSRYLPSYDCLLDDPFDPAWPQPPELPGINYSMDEQCRFDFGSGYQTCLAFRTFEPCKQLWCSHPDNXYFCKTKKGPPLDGTECAPGKWCFKGHCIWKSPEQTYGQDGGWSSWTKFGSCSRSCGGGVRSRSRSCNNPSPAYGGRXCLGPMFEYQVCNSEECPGTYEDFRAQQCAKRNXYYVHQNAKHXWVPYEPDDDAQKCELICQSADXGDVVFMNQVVHDGTRCSYRDPYSVCARGECVPVGCDKEVGSMKADDKCGVCGGDNSHCRTVKGTLGKASKQAGALKLVQIPAGARHIQIEALEKSPHXXVVKNQVTGSFILNPKGKEATSRTFTAMGLEWEDAVEDAKESLKTSGPLPEAIAILALPPTEGGPRSSLAYKYVIHEDLLPLIGSNNVLLEEMDTYEWALKSWAPCSKACGGGIQFTKYGCRRRRDHHMVQRHLCDHKKRPKPIRRRCNQHPCSQPVWVTEEWGACSRSCGKLGVQTRGIQCLLPLSNGTHKVMPAKACAGDRPEARRPCLRVPCPAQWRLGAWSQCSATCGEGIQQRQVVCRTNANSLGHCEGDRPDTVQVCXLPACGGNHQNSTVRADVWELGTPEGQWVPQSXPLHPINKISSMCAAEPCTGDRSVFCQMEVLDRYCSIPGYHRLCCVSCIKKASGPNPGPDPGPTSLPPFSTPGSPLPGPQDPADAAEPPGKPTGSEDHQHGRATQLPGALDTSSPGTQHPFAPETPIPGASWSISPTTPGGLPWGWTQTPTPVPDLPGRPLEPYSESY

SEQ ID NO: 150 - DNA, 3642 bp, Homo sapiens
  CDS (1)...(3642)
atggctccactccgcgcgctgctgtcctacctgctgcctttgcactgtgcgctctgcrccgccgcgggcagccggaccccagagctgcacctctctggaaagctcagtgactatggtgtgacagtgccctgcagcacagactttcggggacgcttcctctcccacgtggtgtctggcccagcagcagcctctgcagggagcatggtagtggacacgccacccacactaccacgacactccagtcacctccgggtggctcgcagccctctgcacccaggagggaccctgtggcctggcagggtggggcgccactccctctacttcaatgtcactgttttcgggaaggaactgcacttgcgcctgcggcccaatcggaggttggtagtgccaggatcctcagtggagtggcaggaggattttcgggagctgttccggcagcccttacggcaggagtgtgtgtacactggaggtgtcactggaatgcctggggcagctgttgccatcagcaactgtgacggattggcgggcctcatccgcacagacagcaccgacttcttcattgagcctctggagcggggccagcaggagaaggaggccagcgggaggacacatgtggtgtaccgccgggaggccgtccagcaggagtgggcagaacctgacggggacctgcacaatgaagcctttggcctgggagaccttcccaacctgctgggcctggtgggggaccagctgggcgacacagagcggaagcggcggcatgccaagccaggcagctacagcatcgaggtgctgctggtggtggacgactcggtggttcgcttccatggcaaggagcatgtgcagaactatgtcctcaccctcatgaatatcgtagatgagatttaccacgatgagtccctgggggttcatataaatattgccctcgtccgcttgatcatggttggctaccgacagtccctgagcctgatcgagcgcgggaacccctcacgcagcctggagcaggtgtgtcgctgggcacactcccagcagcgccaggaccccagccacgctgagcaccatgaccacgttgtgttcctcacccggcaggactttgggccctcagggtatgcacccgtcactggcatgtgtcaccccctgaggagctgtgccctcaaccatgaggatggcttctcctcagccttcgtgatagctcatgagaccggccacgtgctcggcatggagcatgacggtcaggggaatggctgtgcagatgagaccagcctgggcagcgtcatggcgcccctggtgcaggctgccttccaccgcttccattggtcccgctgcagcaagctggagctcagccgctacctcccctcctacgactgcctcctcgatgacccctttgatcctgcctggccccagcccccagagctgcctgggatcaactactcaatggatgagcagtgccgctttgactttggcagtggctaccagacctgcttggcattcaggacctttgagccctgcaagcagctgtggtgcagccatcctgacaaccmgtayttctgcaagaccaagaaggggcccccgctggatgggactgagtgtgcacccggcaagtggtgcttcaaaggtcactgcatctggaagtcgccggagcagacatatggccaggatggaggctggagctcctggaccaagtttgggtcatgttcgcggtcatgtgggggcggggtgcgatcccgcagccggagctgcaacaacccctccccagcctatggaggccgccygtgcttagggcccatgttcgagtaccaggtctgcaacagcgaggagtgccctgggacctacgaggacttccgggcccagcagtgtgccaagcgcaactcstactatgtgcaccagaatgccaagcacagstgggtgccctacgagcctgacgatgacgcccagaagtgtgagctgatctgccagtcggcggacacrggggacgtggtgttcatgaaccaggtggttcacgatgggacacgctgcagctaccgggacccatacagcgtctgtgcgcgtggcgagtgtgtgcctgtcggctgtgacaaggaggtggggtccatgaaggcggatgacaagtgtggagtctgcgggggtgacaactcccactgcaggactgtgaaggggacgctgggcaaggcctccaagcaggcaggagctctcaagctggtgcagatcccagcaggtgccaggcacatccagattgaggcactggagaagtccccccaccgswywgtggtgaagaaccaggtcaccggcagcttcatcctcaaccccaagggcaaggaagccacaagccggaccttcaccgccatgggcctggagtgggaggatgcggtggaggatgccaaggaaagcctcaagaccagcgggcccctgcctgaagccattgccatcctggctctccccccaactgagggtggcccccgcagcagcctggcctacaagtacgtcatccatgaggacctgctgccccttatcgggagcaacaatgtgctcctggaggagatggacacctatgagtgggcgctcaagagctgggccccctgcagcaaggcctgtggaggagggatccagttcaccaaatacggctgccggcgcagacgagaccaccacatggtgcagcgacacctgtgtgaccacaagaagaggcccaagcccatccgccggcgctgcaaccagcacccgtgctctcagcctgtgtgggtgacggaggagtggggtgcctgcagccggagctgtgggaagctgggggtgcagacacgggggatacagtgcctgctgcccctctccaatggaacccacaaggtcatgccggccaaagcctgcgccggggaccggcctgaggcccgacggccctgtctccgagtgccctgcccagcccagtggaggctgggagcctggtcccagtgctctgccacctgtggagagggcatccagcagcggcaggtggtgtgcaggaccaacgccaacagcctcgggcattgcgagggggataggccagacactgtccaggtctgcarcctgcccgcctgtggaggaaatcaccagaactccacggtgagggccgatgtctgggaacttgggacgccagaggggcagtgggtgccacaatctgracccctacatcccattaacaagatatcatcaacggagccctgcacgggagacaggtctgtcttctgccagatggaagtgctcgatcgctactgctccattcccggctaccaccggctctgctgtgtgtcctgcatcaagaaggcctcgggccccaaccctggcccagaccctggcccaacctcactgccccccttctccactcctggaagccccttaccaggaccccaggaccctgcagatgctgcagagcctcctggaaagccaacgggatcagaggaccatcagcatggccgagccacacagctcccaggagctctggatacaagctccccagggacccagcatccctttgcccctgagacaccaatccctggagcatcctggagcatctcccctaccacccccggggggctgccttggggctggactcagacacctacgccagtccctgacctgcccgggcggccgctcgagccctatagtgagtcgtattag

SEQ ID NO: 151 - protein, 1213 aa, Homo sapiens
  VARIANT (1)...(1213): Xaa = Any Amino Acid
MAPLRALLSYLLPLHCALCXAAGSRTPELHLSGKLSDYGVTVPCSTDFRGRFLSHVVSGPAAASAGSMVVDTPPTLPRHSSHLRVARSPLHPGGTLWPGRVGRHSLYFNVTVFGKELHLRLRPNRRLVVPGSSVEWQEDFRELFRQPLRQECVYTGGVTGMPGAAVAISNCDGLAGLIRTDSTDFFIEPLERGQQEKEASGRTHVVYRREAVQQEWAEPDGDLHNEAFGLGDLPNLLGLVGDQLGDTERKRRHAKPGSYSIEVLLVVDDSVVRFHGKEHVQNYVLTLMNIVDEIYHDESLGVHINIALVRLIMVGYRQSLSLIERGNPSRSLEQVCRWAHSQQRQDPSHAEHHDHVVFLTRQDFGPSGYAPVTGMCHPLRSCALNHEDGFSSAFVIAHETGHVLGMEHDGQGNGCADETSLGSVMAPLVQAAFHRFHWSRCSKLELSRYLPSYDCLLDDPFDPAWPQPPELPGINYSMDEQCRFDFGSGYQTCLAFRTFEPCKQLWCSHPDNXYFCKTKKGPPLDGTECAPGKWCFKGHCIWKSPEQTYGQDGGWSSWTKFGSCSRSCGGGVRSRSRSCNNPSPAYGGRXCLGPMFEYQVCNSEECPGTYEDFRAQQCAKRNXYYVHQNAKHXWVPYEPDDDAQKCELICQSADXGDVVFMNQVVHDGTRCSYRDPYSVCARGECVPVGCDKEVGSMKADDKCGVCGGDNSHCRTVKGTLGKASKQAGALKLVQIPAGARHIQIEALEKSPHXXVVKNQVTGSFILNPKGKEATSRTFTAMGLEWEDAVEDAKESLKTSGPLPEAIAILALPPTEGGPRSSLAYKYVIHEDLLPLIGSNNVLLEEMDTYEWALKSWAPCSKACGGGIQFTKYGCRRRRDHHMVQRHLCDHKKRPKPIRRRCNQHPCSQPVWVTEEWGACSRSCGKLGVQTRGIQCLLPLSNGTHKVMPAKACAGDRPEARRPCLRVPCPAQWRLGAWSQCSATCGEGIQQRQVVCRTNANSLGHCEGDRPDTVQVCXLPACGGNHQNSTVRADVWELGTPEGQWVPQSXPLHPINKISSTEPCTGDRSVFCQMEVLDRYCSIPGYHRLCCVSCIKKASGPNPGPDPGPTSLPPFSTPGSPLPGPQDPADAAEPPGKPTGSEDHQHGRATQLPGALDTSSPGTQHPFAPETPIPGASWSISPTTPGGLPWGWTQTPTPVPDLPGRPLEPYSESY

SEQ ID NO: 152 - DNA, 3708 bp, Homo sapiens
  CDS (1)...(3708)
atggctccactccgcgcgctgctgtcctacctgctgcctttgcactgtgcgctctgcrccgccgcgggcagccggaccccagagctgcacctctctggaaagctcagtgactatggtgtgacagtgccctgcagcacagactttcggggacgcttcctctcccacgtggtgtctggcccagcagcagcctctgcagggagcatggtagtggacacgccacccacactaccacgacactccagtcacctccgggtggctcgcagccctctgcacccaggagggaccctgtggcctggcagggtggggcgccactccctctacttcaatgtcactgttttcgggaaggaactgcacttgcgcctgcggcccaatcggaggttggtagtgccaggatcctcagtggagtggcaggaggattttcgggagctgttccggcagcccttacggcaggagtgtgtgtacactggaggtgtcactggaatgcctggggcagctgttgccatcagcaactgtgacggattggcgggcctcatccgcacagacagcaccgacttcttcattgagcctctggagcggggccagcaggagaaggaggccagcgggaggacacatgtggtgtaccgccgggaggccgtccagcaggagtgggcagaacctgacggggacctgcacaatgaagcctttggcctgggagaccttcccaacctgctgggcctggtgggggaccagctgggcgacacagagcggaagcggcggcatgccaagccaggcagctacagcatcgaggtgctgctggtggtggacgactcggtggttcgcttccatggcaaggagcatgtgcagaactatgtcctcaccctcatgaatatcgtagatgagatttaccacgatgagtccctgggggttcatataaatattgccctcgtccgcttgatcatggttggctaccgacagtccctgagcctgatcgagcgcgggaacccctcacgcagcctggagcaggtgtgtcgctgggcacactcccagcagcgccaggaccccagccacgctgagcaccatgaccacgttgtgttcctcacccggcaggactttgggccctcagggtatgcacccgtcactggcatgtgtcaccccctgaggagctgtgccctcaaccatgaggatggcttctcctcagccttcgtgatagctcatgagaccggccacgtgctcggcatggagcatgacggtcaggggaatggctgtgcagatgagaccagcctgggcagcgtcatggcgcccctggtgcaggctgccttccaccgcttccattggtcccgctgcagcaagctggagctcagccgctacctcccctcctacgactgcctcctcgatgacccctttgatcctgcctggccccagcccccagagctgcctgggatcaactactcaatggatgagcagtgccgctttgactttggcagtggctaccagacctgcttggcattcaggacctttgagccctgcaagcagctgtggtgcagccatcctgacaaccmgtayttctgcaagaccaagaaggggcccccgctggatgggactgagtgtgcacccggcaagtggtgcttcaaaggtcactgcatctggaagtcgccggagcagacatatggccaggatggaggctggagctcctggaccaagtttgggtcatgttcgcggtcatgtgggggcggggtgcgatcccgcagccggagctgcaacaacccctccccagcctatggaggccgccygtgcttagggcccatgttcgagtaccaggtctgcaacagcgaggagtgccctgggacctacgaggacttccgggcccagcagtgtgccaagcgcaactcstactatgtgcaccagaatgccaagcacagstgggtgccctacgagcctgacgatgacgcccagaagtgtgagctgatctgccagtcggcggacacrggggacgtggtgttcatgaaccaggtggttcacgatgggacacgctgcagctaccgggacccatacagcgtctgtgcgcgtggcgagtgtgtgcctgtcggctgtgacaaggaggtggggtccatgaaggcggatgacaagtgtggagtctgcgggggtgacaactcccactgcaggactgtgaaggggacgctgggcaaggcctccaagcaggcaggagctctcaagctggtgcagatcccagcaggtgccaggcacatccagattgaggcactggagaagtccccccaccgswywgtggtgaagaaccaggtcaccggcagcttcatcctcaaccccaagggcaaggaagccacaagccggaccttcaccgccatgggcctggagtgggaggatgcggtggaggatgccaaggaaagcctcaagaccagcgggcccctgcctgaagccattgccatcctggctctccccccaactgagggtggcccccgcagcagcctggcctacaagtacgtcatccatgaggacctgctgccccttatcgggagcaacaatgtgctcctggaggagatggacacctatgagtgggcgctcaagagctgggccccctgcagcaaggcctgtggaggagggatccagttcaccaaatacggctgccggcgcagacgagaccaccacatggtgcagcgacacctgtgtgaccacaagaagaggcccaagcccatccgccggcgctgcaaccagcacccgtgctctcagcctgtgtgggtgacggaggagtggggtgcctgcagccggagctgtgggaagctgggggtgcagacacgggggatacagtgcctgctgcccctctccaatggaacccacaaggtcatgccggccaaagcctgcgccggggaccggcctgaggcccgacggccctgtctccgagtgccctgcccagcccagtggaggctgggagcctggtcccagtgctctgccacctgtggagagggcatccagcagcggcaggtggtgtgcaggaccaacgccaacagcctcgggcattgcgagggggataggccagacactgtccaggtctgcarcctgcccgcctgtggaggaaatcaccagaactccacggtgagggccgatgtctgggaacttgggacgccagaggggcagtgggtgccacaatctgracccctacatcccattaacaagatatcatcaatgtgtgcagcggagccctgcacgggagacaggtctgtcttctgccagatggaagtgctcgatcgctactgctccattcccggctaccaccggctctgctgtgtgtcctgcatcaagaaggcctcgggccccaaccctggcccagaccctggcccaacctcactgccccccttctccactcctggaagccccttaccaggaccccaggaccctgcagatgctgcagagcctcctggaaagccaacgggatcagaggaccatcagcatggccgagccacacagctcccaggagctctggatacaagctccccagggacccagcatccctttgcccctgagacaccaatccctggagcatcctggagcatctcccctaccacccccggggggctgccttggggctggactcagacacctacgccagtccctgaggacaaagggcaacctggagaagacctgagacatcccggcaccagcctccctgctgacctgcccgggcggccgcccgagccctatagtgagtctgattag

SEQ ID NO: 153 - protein, 1235 aa, Homo sapiens
  VARIANT (1)...(1235): Xaa = Any Amino Acid
MAPLRALLSYLLPLHCALCXAAGSRTPELHLSGKLSDYGVTVPCSTDFRGRFLSHVVSGPAAASAGSMVVDTPPTLPRHSSHLRVARSPLHPGGTLWPGRVGRHSLYFNVTVFGKELHLRLRPNRRLVVPGSSVEWQEDFRELFRQPLRQECVYTGGVTGMPGAAVAISNCDGLAGLIRTDSTDFFIEPLERGQQEKEASGRTHVVYRREAVQQEWAEPDGDLHNEAFGLGDLPNLLGLVGDQLGDTERKRRHAKPGSYSIEVLLVVDDSVVRFHGKEHVQNYVLTLMNIVDEIYHDESLGVHINIALVRLIMVGYRQSLSLIERGNPSRSLEQVCRWAHSQQRQDPSHAEHHDHVVFLTRQDFGPSGYAPVTGMCHPLRSCALNHEDGFSSAFVIAHETGHVLGMEHDGQGNGCADETSLGSVMAPLVQAAFHRFHWSRCSKLELSRYLPSYDCLLDDPFDPAWPQPPELPGINYSMDEQCRFDFGSGYQTCLAFRTFEPCKQLWCSHPDNXYFCKTKKGPPLDGTECAPGKWCFKGHCIWKSPEQTYGQDGGWSSWTKFGSCSRSCGGGVRSRSRSCNNPSPAYGGRXCLGPMFEYQVCNSEECPGTYEDFRAQQCAKRNXYYVHQNAKHXWVPYEPDDDAQKCELICQSADXGDVVFMNQVVHDGTRCSYRDPYSVCARGECVPVGCDKEVGSMKADDKCGVCGGDNSHCRTVKGTLGKASKQAGALKLVQIPAGARHIQIEALEKSPHXXVVKNQVTGSFILNPKGKEATSRTFTAMGLEWEDAVEDAKESLKTSGPLPEAIAILALPPTEGGPRSSLAYKYVIHEDLLPLIGSNNVLLEEMDTYEWALKSWAPCSKACGGGIQFTKYGCRRRRDHHMVQRHLCDHKKRPKPIRRRCNQHPCSQPVWVTEEWGACSRSCGKLGVQTRGIQCLLPLSNGTHKVMPAKACAGDRPEARRPCLRVPCPAQWRLGAWSQCSATCGEGIQQRQVVCRTNANSLGHCEGDRPDTVQVCXLPACGGNHQNSTVRADVWELGTPEGQWVPQSXPLHPINKISSMCAAEPCTGDRSVFCQMEVLDRYCSIPGYHRLCCVSCIKKASGPNPGPDPGPTSLPPFSTPGSPLPGPQDPADAAEPPGKPTGSEDHQHGRATQLPGALDTSSPGTQHPFAPETPIPGASWSISPTTPGGLPWGWTQTPTPVPEDKGQPGEDLRHPGTSLPADLPGRPPEPYSESD

SEQ ID NO: 154 - DNA, 3699 bp, Homo sapiens
  CDS (1)...(3699)
atggctccactccgcgcgctgctgtcctacctgctgcctttgcactgtgcgctctgcrccgccgcgggcagccggaccccagagctgcacctctctggaaagctcagtgactatggtgtgacagtgccctgcagcacagactttcggggacgcttcctctcccacgtggtgtctggcccagcagcagcctctgcagggagcatggtagtggacacgccacccacactaccacgacactccagtcacctccgggtggctcgcagccctctgcacccaggagggaccctgtggcctggcagggtggggcgccactccctctacttcaatgtcactgttttcgggaaggaactgcacttgcgcctgcggcccaatcggaggttggtagtgccaggatcctcagtggagtggcaggaggattttcgggagctgttccggcagcccttacggcaggagtgtgtgtacactggaggtgtcactggaatgcctggggcagctgttgccatcagcaactgtgacggattggcgggcctcatccgcacagacagcaccgacttcttcattgagcctctggagcggggccagcaggagaaggaggccagcgggaggacacatgtggtgtaccgccgggaggccgtccagcaggagtgggcagaacctgacggggacctgcacaatgaagcctttggcctgggagaccttcccaacctgctgggcctggtgggggaccagctgggcgacacagagcggaagcggcggcatgccaagccaggcagctacagcatcgaggtgctgctggtggtggacgactcggtggttcgcttccatggcaaggagcatgtgcagaactatgtcctcaccctcatgaatatcgtagatgagatttaccacgatgagtccctgggggttcatataaatattgccctcgtccgcttgatcatggttggctaccgacagtccctgagcctgatcgagcgcgggaacccctcacgcagcctggagcaggtgtgtcgctgggcacactcccagcagcgccaggaccccagccacgctgagcaccatgaccacgttgtgttcctcacccggcaggactttgggccctcagggtatgcacccgtcactggcatgtgtcaccccctgaggagctgtgccctcaaccatgaggatggcttctcctcagccttcgtgatagctcatgagaccggccacgtgctcggcatggagcatgacggtcaggggaatggctgtgcagatgagaccagcctgggcagcgtcatggcgcccctggtgcaggctgccttccaccgcttccattggtcccgctgcagcaagctggagctcagccgctacctcccctcctacgactgcctcctcgatgacccctttgatcctgcctggccccagcccccagagctgcctgggatcaactactcaatggatgagcagtgccgctttgactttggcagtggctaccagacctgcttggcattcaggacctttgagccctgcaagcagctgtggtgcagccatcctgacaaccmgtayttctgcaagaccaagaaggggcccccgctggatgggactgagtgtgcacccggcaagtggtgcttcaaaggtcactgcatctggaagtcgccggagcagacatatggccaggatggaggctggagctcctggaccaagtttgggtcatgttcgcggtcatgtgggggcggggtgcgatcccgcagccggagctgcaacaacccctccccagcctatggaggccgccygtgcttagggcccatgttcgagtaccaggtctgcaacagcgaggagtgccctgggacctacgaggacttccgggcccagcagtgtgccaagcgcaactcstactatgtgcaccagaatgccaagcacagstgggtgccctacgagcctgacgatgacgcccagaagtgtgagctgatctgccagtcggcggacacrggggacgtggtgttcatgaaccaggtggttcacgatgggacacgctgcagctaccgggacccatacagcgtctgtgcgcgtggcgagtgtgtgcctgtcggctgtgacaaggaggtggggtccatgaaggcggatgacaagtgtggagtctgcgggggtgacaactcccactgcaggactgtgaaggggacgctgggcaaggcctccaagcaggcaggagctctcaagctggtgcagatcccagcaggtgccaggcacatccagattgaggcactggagaagtccccccaccgswywgtggtgaagaaccaggtcaccggcagcttcatcctcaaccccaagggcaaggaagccacaagccggaccttcaccgccatgggcctggagtgggaggatgcggtggaggatgccaaggaaagcctcaagaccagcgggcccctgcctgaagccattgccatcctggctctccccccaactgagggtggcccccgcagcagcctggcctacaagtacgtcatccatgaggacctgctgccccttatcgggagcaacaatgtgctcctggaggagatggacacctatgagtgggcgctcaagagctgggccccctgcagcaaggcctgtggaggagggatccagttcaccaaatacggctgccggcgcagacgagaccaccacatggtgcagcgacacctgtgtgaccacaagaagaggcccaagcccatccgccggcgctgcaaccagcacccgtgctctcagcctgtgtgggtgacggaggagtggggtgcctgcagccggagctgtgggaagctgggggtgcagacacgggggatacagtgcctgctgcccctctccaatggaacccacaaggtcatgccggccaaagcctgcgccggggaccggcctgaggcccgacggccctgtctccgagtgccctgcccagcccagtggaggctgggagcctggtcccagtgctctgccacctgtggagagggcatccagcagcggcaggtggtgtgcaggaccaacgccaacagcctcgggcattgcgagggggataggccagacactgtccaggtctgcarcctgcccgcctgtggaggaaatcaccagaactccacggtgagggccgatgtctgggaacttgggacgccagaggggcagtgggtgccacaatctgracccctacatcccattaacaagatatcatcaacggagccctgcacgggagacaggtctgtcttctgccagatggaagtgctcgatcgctactgctccattcccggctaccaccggctctgctgtgtgtcctgcatcaagaaggcctcgggccccaaccctggcccagaccctggcccaacctcactgccccccttctccactcctggaagccccttaccaggaccccaggaccctgcagatgctgcagagcctcctggaaagccaacgggatcagaggaccatcagcatggccgagccacacagctcccaggagctctggatacaagctccccagggacccagcatccctttgcccctgagacaccaatccctggagcatcctggagcatctcccctaccacccccggggggctgccttggggctggactcagacacctacgccagtccctgaggacaaagggcaacctggagaagacctgagacatcccggcaccagcctccctgctgacctgcccgggcggccgcccgagccctatagtgagtctgattag

SEQ ID NO: 155 - protein, 1232 aa, Homo sapiens
  VARIANT (1)...(1232): Xaa = Any Amino Acid
MAPLRALLSYLLPLHCALCXAAGSRTPELHLSGKLSDYGVTVPCSTDFRGRFLSHVVSGPAAASAGSMVVDTPPTLPRHSSHLRVARSPLHPGGTLWPGRVGRHSLYFNVTVFGKELHLRLRPNRRLVVPGSSVEWQEDFRELFRQPLRQECVYTGGVTGMPGAAVAISNCDGLAGLIRTDSTDFFIEPLERGQQEKEASGRTHVVYRREAVQQEWAEPDGDLHNEAFGLGDLPNLLGLVGDQLGDTERKRRHAKPGSYSIEVLLVVDDSVVRFHGKEHVQNYVLTLMNIVDEIYHDESLGVHINIALVRLIMVGYRQSLSLIERGNPSRSLEQVCRWAHSQQRQDPSHAEHHDHVVFLTRQDFGPSGYAPVTGMCHPLRSCALNHEDGFSSAFVIAHETGHVLGMEHDGQGNGCADETSLGSVMAPLVQAAFHRFHWSRCSKLELSRYLPSYDCLLDDPFDPAWPQPPELPGINYSMDEQCRFDFGSGYQTCLAFRTFEPCKQLWCSHPDNXYFCKTKKGPPLDGTECAPGKWCFKGHCIWKSPEQTYGQDGGWSSWTKFGSCSRSCGGGVRSRSRSCNNPSPAYGGRXCLGPMFEYQVCNSEECPGTYEDFRAQQCAKRNXYYVHQNAKHXWVPYEPDDDAQKCELICQSADXGDVVFMNQVVHDGTRCSYRDPYSVCARGECVPVGCDKEVGSMKADDKCGVCGGDNSHCRTVKGTLGKASKQAGALKLVQIPAGARHIQIEALEKSPHXXVVKNQVTGSFILNPKGKEATSRTFTAMGLEWEDAVEDAKESLKTSGPLPEAIAILALPPTEGGPRSSLAYKYVIHEDLLPLIGSNNVLLEEMDTYEWALKSWAPCSKACGGGIQFTKYGCRRRRDHHMVQRHLCDHKKRPKPIRRRCNQHPCSQPVWVTEEWGACSRSCGKLGVQTRGIQCLLPLSNGTHKVMPAKACAGDRPEARRPCLRVPCPAQWRLGAWSQCSATCGEGIQQRQVVCRTNANSLGHCEGDRPDTVQVCXLPACGGNHQNSTVRADVWELGTPEGQWVPQSXPLHPINKISSTEPCTGDRSVFCQMEVLDRYCSIPGYHRLCCVSCIKKASGPNPGPDPGPTSLPPFSTPGSPLPGPQDPADAAEPPGKPTGSEDHQHGRATQLPGALDTSSPGTQHPFAPETPIPGASWSISPTTPGGLPWGWTQTPTPVPEDKGQPGEDLRHPGTSLPADLPGRPPEPYSESD

SEQ ID NO: 156 - DNA, 3759 bp, Homo sapiens
  CDS (1)...(3759)
atggctccactccgcgcgctgctgtcctacctgctgcctttgcactgtgcgctctgcrccgccgcgggcagccggaccccagagctgcacctctctggaaagctcagtgactatggtgtgacagtgccctgcagcacagactttcggggacgcttcctctcccacgtggtgtctggcccagcagcagcctctgcagggagcatggtagtggacacgccacccacactaccacgacactccagtcacctccgggtggctcgcagccctctgcacccaggagggaccctgtggcctggcagggtggggcgccactccctctacttcaatgtcactgttttcgggaaggaactgcacttgcgcctgcggcccaatcggaggttggtagtgccaggatcctcagtggagtggcaggaggattttcgggagctgttccggcagcccttacggcaggagtgtgtgtacactggaggtgtcactggaatgcctggggcagctgttgccatcagcaactgtgacggattggcgggcctcatccgcacagacagcaccgacttcttcattgagcctctggagcggggccagcaggagaaggaggccagcgggaggacacatgtggtgtaccgccgggaggccgtccagcaggagtgggcagaacctgacggggacctgcacaatgaagcctttggcctgggagaccttcccaacctgctgggcctggtgggggaccagctgggcgacacagagcggaagcggcggcatgccaagccaggcagctacagcatcgaggtgctgctggtggtggacgactcggtggttcgcttccatggcaaggagcatgtgcagaactatgtcctcaccctcatgaatatcgtagatgagatttaccacgatgagtccctgggggttcatataaatattgccctcgtccgcttgatcatggttggctaccgacagtccctgagcctgatcgagcgcgggaacccctcacgcagcctggagcaggtgtgtcgctgggcacactcccagcagcgccaggaccccagccacgctgagcaccatgaccacgttgtgttcctcacccggcaggactttgggccctcagggtatgcacccgtcactggcatgtgtcaccccctgaggagctgtgccctcaaccatgaggatggcttctcctcagccttcgtgatagctcatgagaccggccacgtgctcggcatggagcatgacggtcaggggaatggctgtgcagatgagaccagcctgggcagcgtcatggcgcccctggtgcaggctgccttccaccgcttccattggtcccgctgcagcaagctggagctcagccgctacctcccctcctacgactgcctcctcgatgacccctttgatcctgcctggccccagcccccagagctgcctgggatcaactactcaatggatgagcagtgccgctttgactttggcagtggctaccagacctgcttggcattcaggacctttgagccctgcaagcagctgtggtgcagccatcctgacaaccmgtayttctgcaagaccaagaaggggcccccgctggatgggactgagtgtgcacccggcaagtggtgcttcaaaggtcactgcatctggaagtcgccggagcagacatatggccaggatggaggctggagctcctggaccaagtttgggtcatgttcgcggtcatgtgggggcggggtgcgatcccgcagccggagctgcaacaacccctccccagcctatggaggccgccygtgcttagggcccatgttcgagtaccaggtctgcaacagcgaggagtgccctgggacctacgaggacttccgggcccagcagtgtgccaagcgcaactcstactatgtgcaccagaatgccaagcacagstgggtgccctacgagcctgacgatgacgcccagaagtgtgagctgatctgccagtcggcggacacrggggacgtggtgttcatgaaccaggtggttcacgatgggacacgctgcagctaccgggacccatacagcgtctgtgcgcgtggcgagtgtgtgcctgtcggctgtgacaaggaggtggggtccatgaaggcggatgacaagtgtggagtctgcgggggtgacaactcccactgcaggactgtgaaggggacgctgggcaaggcctccaagcaggcaggagctctcaagctggtgcagatcccagcaggtgccaggcacatccagattgaggcactggagaagtccccccaccgswywgtggtgaagaaccaggtcaccggcagcttcatcctcaaccccaagggcaaggaagccacaagccggaccttcaccgccatgggcctggagtgggaggatgcggtggaggatgccaaggaaagcctcaagaccagcgggcccctgcctgaagccattgccatcctggctctccccccaactgagggtggcccccgcagcagcctggcctacaagtacgtcatccatgaggacctgctgccccttatcgggagcaacaatgtgctcctggaggagatggacacctatgagtgggcgctcaagagctgggccccctgcagcaaggcctgtggaggagggatccagttcaccaaatacggctgccggcgcagacgagaccaccacatggtgcagcgacacctgtgtgaccacaagaagaggcccaagcccatccgccggcgctgcaaccagcacccgtgctctcagcctgtgtgggtgacggaggagtggggtgcctgcagccggagctgtgggaagctgggggtgcagacacgggggatacagtgcctgctgcccctctccaatggaacccacaaggtcatgccggccaaagcctgcgccggggaccggcctgaggcccgacggccctgtctccgagtgccctgcccagcccagtggaggctgggagcctggtcccagtgctctgccacctgtggagagggcatccagcagcggcaggtggtgtgcaggaccaacgccaacagcctcgggcattgcgagggggataggccagacactgtccaggtctgcarcctgcccgcctgtggaggaaatcaccagaactccacggtgagggccgatgtctgggaacttgggacgccagaggggcagtgggtgccacaatctgracccctacatcccattaacaagatatcatcaatgtgtgcagcggagccctgcacgggagacaggtctgtcttctgccagatggaagtgctcgatcgctactgctccattcccggctaccaccggctctgctgtgtgtcctgcatcaagaaggcctcgggccccaaccctggcccagaccctggcccaacctcactgccccccttctccactcctggaagccccttaccaggaccccaggaccctgcagatgctgcagagcctcctggaaagccaacgggatcagaggaccatcagcatggccgagccacacagctcccaggagctctggatacaagctccccagggacccagcatccctttgcccctgagacaccaatccctggagcatcctggagcatctcccctaccacccccggggggctgccttggggctggactcagacacctacgccagtccctgaggacaaagggcaacctggagaagacctgagacatcccggcaccagcctccctgctgacctgcccgggcggccgcccgagccctgccatcccactggcacgtttacactctgtgtactgccccgtgactcccagctcagaggacacacatag

SEQ ID NO: 157 - protein, 1252 aa, Homo sapiens
  VARIANT (1)...(1252): Xaa = Any Amino Acid
MAPLRALLSYLLPLHCALCXAAGSRTPELHLSGKLSDYGVTVPCSTDFRGRFLSHVVSGPAAASAGSMVVDTPPTLPRHSSHLRVARSPLHPGGTLWPGRVGRHSLYFNVTVFGKELHLRLRPNRRLVVPGSSVEWQEDFRELFRQPLRQECVYTGGVTGMPGAAVAISNCDGLAGLIRTDSTDFFIEPLERGQQEKEASGRTHVVYRREAVQQEWAEPDGDLHNEAFGLGDLPNLLGLVGDQLGDTERKRRHAKPGSYSIEVLLVVDDSVVRFHGKEHVQNYVLTLMNIVDEIYHDESLGVHINIALVRLIMVGYRQSLSLIERGNPSRSLEQVCRWAHSQQRQDPSHAEHHDHVVFLTRQDFGPSGYAPVTGMCHPLRSCALNHEDGFSSAFVIAHETGHVLGMEHDGQGNGCADETSLGSVMAPLVQAAFHRFHWSRCSKLELSRYLPSYDCLLDDPFDPAWPQPPELPGINYSMDEQCRFDFGSGYQTCLAFRTFEPCKQLWCSHPDNXYFCKTKKGPPLDGTECAPGKWCFKGHCIWKSPEQTYGQDGGWSSWTKFGSCSRSCGGGVRSRSRSCNNPSPAYGGRXCLGPMFEYQVCNSEECPGTYEDFRAQQCAKRNXYYVHQNAKHXWVPYEPDDDAQKCELICQSADXGDVVFMNQVVHDGTRCSYRDPYSVCARGECVPVGCDKEVGSMKADDKCGVCGGDNSHCRTVKGTLGKASKQAGALKLVQIPAGARHIQIEALEKSPHXXVVKNQVTGSFILNPKGKEATSRTFTAMGLEWEDAVEDAKESLKTSGPLPEAIAILALPPTEGGPRSSLAYKYVIHEDLLPLIGSNNVLLEEMDTYEWALKSWAPCSKACGGGIQFTKYGCRRRRDHHMVQRHLCDHKKRPKPIRRRCNQHPCSQPVWVTEEWGACSRSCGKLGVQTRGIQCLLPLSNGTHKVMPAKACAGDRPEARRPCLRVPCPAQWRLGAWSQCSATCGEGIQQRQVVCRTNANSLGHCEGDRPDTVQVCXLPACGGNHQNSTVRADVWELGTPEGQWVPQSXPLHPINKISSMCAAEPCTGDRSVFCQMEVLDRYCSIPGYHRLCCVSCIKKASGPNPGPDPGPTSLPPFSTPGSPLPGPQDPADAAEPPGKPTGSEDHQHGRATQLPGALDTSSPGTQHPFAPETPIPGASWSISPTTPGGLPWGWTQTPTPVPEDKGQPGEDLRHPGTSLPADLPGRPPEPCHPTGTFTLCVLPRDSQLRGHT

SEQ ID NO: 158 - DNA, 3750 bp, Homo sapiens
  CDS (1)...(3750)
atggctccactccgcgcgctgctgtcctacctgctgcctttgcactgtgcgctctgcrccgccgcgggcagccggaccccagagctgcacctctctggaaagctcagtgactatggtgtgacagtgccctgcagcacagactttcggggacgcttcctctcccacgtggtgtctggcccagcagcagcctctgcagggagcatggtagtggacacgccacccacactaccacgacactccagtcacctccgggtggctcgcagccctctgcacccaggagggaccctgtggcctggcagggtggggcgccactccctctacttcaatgtcactgttttcgggaaggaactgcacttgcgcctgcggcccaatcggaggttggtagtgccaggatcctcagtggagtggcaggaggattttcgggagctgttccggcagcccttacggcaggagtgtgtgtacactggaggtgtcactggaatgcctggggcagctgttgccatcagcaactgtgacggattggcgggcctcatccgcacagacagcaccgacttcttcattgagcctctggagcggggccagcaggagaaggaggccagcgggaggacacatgtggtgtaccgccgggaggccgtccagcaggagtgggcagaacctgacggggacctgcacaatgaagcctttggcctgggagaccttcccaacctgctgggcctggtgggggaccagctgggcgacacagagcggaagcggcggcatgccaagccaggcagctacagcatcgaggtgctgctggtggtggacgactcggtggttcgcttccatggcaaggagcatgtgcagaactatgtcctcaccctcatgaatatcgtagatgagatttaccacgatgagtccctgggggttcatataaatattgccctcgtccgcttgatcatggttggctaccgacagtccctgagcctgatcgagcgcgggaacccctcacgcagcctggagcaggtgtgtcgctgggcacactcccagcagcgccaggaccccagccacgctgagcaccatgaccacgttgtgttcctcacccggcaggactttgggccctcagggtatgcacccgtcactggcatgtgtcaccccctgaggagctgtgccctcaaccatgaggatggcttctcctcagccttcgtgatagctcatgagaccggccacgtgctcggcatggagcatgacggtcaggggaatggctgtgcagatgagaccagcctgggcagcgtcatggcgcccctggtgcaggctgccttccaccgcttccattggtcccgctgcagcaagctggagctcagccgctacctcccctcctacgactgcctcctcgatgacccctttgatcctgcctggccccagcccccagagctgcctgggatcaactactcaatggatgagcagtgccgctttgactttggcagtggctaccagacctgcttggcattcaggacctttgagccctgcaagcagctgtggtgcagccatcctgacaaccmgtayttctgcaagaccaagaaggggcccccgctggatgggactgagtgtgcacccggcaagtggtgcttcaaaggtcactgcatctggaagtcgccggagcagacatatggccaggatggaggctggagctcctggaccaagtttgggtcatgttcgcggtcatgtgggggcggggtgcgatcccgcagccggagctgcaacaacccctccccagcctatggaggccgccygtgcttagggcccatgttcgagtaccaggtctgcaacagcgaggagtgccctgggacctacgaggacttccgggcccagcagtgtgccaagcgcaactcstactatgtgcaccagaatgccaagcacagstgggtgccctacgagcctgacgatgacgcccagaagtgtgagctgatctgccagtcggcggacacrggggacgtggtgttcatgaaccaggtggttcacgatgggacacgctgcagctaccgggacccatacagcgtctgtgcgcgtggcgagtgtgtgcctgtcggctgtgacaaggaggtggggtccatgaaggcggatgacaagtgtggagtctgcgggggtgacaactcccactgcaggactgtgaaggggacgctgggcaaggcctccaagcaggcaggagctctcaagctggtgcagatcccagcaggtgccaggcacatccagattgaggcactggagaagtccccccaccgswywgtggtgaagaaccaggtcaccggcagcttcatcctcaaccccaagggcaaggaagccacaagccggaccttcaccgccatgggcctggagtgggaggatgcggtggaggatgccaaggaaagcctcaagaccagcgggcccctgcctgaagccattgccatcctggctctccccccaactgagggtggcccccgcagcagcctggcctacaagtacgtcatccatgaggacctgctgccccttatcgggagcaacaatgtgctcctggaggagatggacacctatgagtgggcgctcaagagctgggccccctgcagcaaggcctgtggaggagggatccagttcaccaaatacggctgccggcgcagacgagaccaccacatggtgcagcgacacctgtgtgaccacaagaagaggcccaagcccatccgccggcgctgcaaccagcacccgtgctctcagcctgtgtgggtgacggaggagtggggtgcctgcagccggagctgtgggaagctgggggtgcagacacgggggatacagtgcctgctgcccctctccaatggaacccacaaggtcatgccggccaaagcctgcgccggggaccggcctgaggcccgacggccctgtctccgagtgccctgcccagcccagtggaggctgggagcctggtcccagtgctctgccacctgtggagagggcatccagcagcggcaggtggtgtgcaggaccaacgccaacagcctcgggcattgcgagggggataggccagacactgtccaggtctgcarcctgcccgcctgtggaggaaatcaccagaactccacggtgagggccgatgtctgggaacttgggacgccagaggggcagtgggtgccacaatctgracccctacatcccattaacaagatatcatcaacggagccctgcacgggagacaggtctgtcttctgccagatggaagtgctcgatcgctactgctccattcccggctaccaccggctctgctgtgtgtcctgcatcaagaaggcctcgggccccaaccctggcccagaccctggcccaacctcactgccccccttctccactcctggaagccccttaccaggaccccaggaccctgcagatgctgcagagcctcctggaaagccaacgggatcagaggaccatcagcatggccgagccacacagctcccaggagctctggatacaagctccccagggacccagcatccctttgcccctgagacaccaatccctggagcatcctggagcatctcccctaccacccccggggggctgccttggggctggactcagacacctacgccagtccctgaggacaaagggcaacctggagaagacctgagacatcccggcaccagcctccctgctgacctgcccgggcggccgcccgagccctgccatcccactggcacgtttacactctgtgtactgccccgtgactcccagctcagaggacacacatag

SEQ ID NO: 159 - protein, 1249 aa, Homo sapiens
  VARIANT (1)...(1249): Xaa = Any Amino Acid
MAPLRALLSYLLPLHCALCXAAGSRTPELHLSGKLSDYGVTVPCSTDFRGRFLSHVVSGPAAASAGSMVVDTPPTLPRHSSHLRVARSPLHPGGTLWPGRVGRHSLYFNVTVFGKELHLRLRPNRRLVVPGSSVEWQEDFRELFRQPLRQECVYTGGVTGMPGAAVAISNCDGLAGLIRTDSTDFFIEPLERGQQEKEASGRTHVVYRREAVQQEWAEPDGDLHNEAFGLGDLPNLLGLVGDQLGDTERKRRHAKPGSYSIEVLLVVDDSVVRFHGKEHVQNYVLTLMNIVDEIYHDESLGVHINIALVRLIMVGYRQSLSLIERGNPSRSLEQVCRWAHSQQRQDPSHAEHHDHVVFLTRQDFGPSGYAPVTGMCHPLRSCALNHEDGFSSAFVIAHETGHVLGMEHDGQGNGCADETSLGSVMAPLVQAAFHRFHWSRCSKLELSRYLPSYDCLLDDPFDPAWPQPPELPGINYSMDEQCRFDFGSGYQTCLAFRTFEPCKQLWCSHPDNXYFCKTKKGPPLDGTECAPGKWCFKGHCIWKSPEQTYGQDGGWSSWTKFGSCSRSCGGGVRSRSRSCNNPSPAYGGRXCLGPMFEYQVCNSEECPGTYEDFRAQQCAKRNXYYVHQNAKHXWVPYEPDDDAQKCELICQSADXGDVVFMNQVVHDGTRCSYRDPYSVCARGECVPVGCDKEVGSMKADDKCGVCGGDNSHCRTVKGTLGKASKQAGALKLVQIPAGARHIQIEALEKSPHXXVVKNQVTGSFILNPKGKEATSRTFTAMGLEWEDAVEDAKESLKTSGPLPEAIAILALPPTEGGPRSSLAYKYVIHEDLLPLIGSNNVLLEEMDTYEWALKSWAPCSKACGGGIQFTKYGCRRRRDHHMVQRHLCDHKKRPKPIRRRCNQHPCSQPVWVTEEWGACSRSCGKLGVQTRGIQCLLPLSNGTHKVMPAKACAGDRPEARRPCLRVPCPAQWRLGAWSQCSATCGEGIQQRQVVCRTNANSLGHCEGDRPDTVQVCXLPACGGNHQNSTVRADVWELGTPEGQWVPQSXPLHPINKISSTEPCTGDRSVFCQMEVLDRYCSIPGYHRLCCVSCIKKASGPNPGPDPGPTSLPPFSTPGSPLPGPQDPADAAEPPGKPTGSEDHQHGRATQLPGALDTSSPGTQHPFAPETPIPGASWSISPTTPGGLPWGWTQTPTPVPEDKGQPGEDLRHPGTSLPADLPGRPPEPCHPTGTFTLCVLPRDSQLRGHT

SEQ ID NO: 160 - DNA, 4277 bp, Homo sapiens
cagcggtccaggcggcggcgccgcgcaggggacccggagcaggcgggagggaagcagctaggcggggaggcggctgaggcggcagcggcggcagccagccggtgctccgacagcccggggcgcaccctagcctcgccgccctcagcctgggacttggggatcgggcgcttgcccagcccgcgtcccagcgcggccacatggctccactccgcgcgctgctgtcctacctgctgcctttgcactgtgcgctctgcrccgccgcgggcagccggaccccagagctgcacctctctggaaagctcagtgactatggtgtgacagtgccctgcagcacagactttcggggacgcttcctctcccacgtggtgtctggcccagcagcagcctctgcagggagcatggtagtggacacgccacccacactaccacgacactccagtcacctccgggtggctcgcagccctctgcacccaggagggaccctgtggcctggcagggtggggcgccactccctctacttcaatgtcactgttttcgggaaggaactgcacttgcgcctgcggcccaatcggaggttggtagtgccaggatcctcagtggagtggcaggaggattttcgggagctgttccggcagcccttacggcaggagtgtgtgtacactggaggtgtcactggaatgcctggggcagctgttgccatcagcaactgtgacggattggcgggcctcatccgcacagacagcaccgacttcttcattgagcctctggagcggggccagcaggagaaggaggccagcgggaggacacatgtggtgtaccgccgggaggccgtccagcaggagtgggcagaacctgacggggacctgcacaatgaagcctttggcctgggagaccttcccaacctgctgggcctggtgggggaccagctgggcgacacagagcggaagcggcggcatgccaagccaggcagctacagcatcgaggtgctgctggtggtggacgactcggtggttcgcttccatggcaaggagcatgtgcagaactatgtcctcaccctcatgaatatcgtagatgagatttaccacgatgagtccctgggggttcatataaatattgccctcgtccgcttgatcatggttggctaccgacagtccctgagcctgatcgagcgcgggaacccctcacgcagcctggagcaggtgtgtcgctgggcacactcccagcagcgccaggaccccagccacgctgagcaccatgaccacgttgtgttcctcacccggcaggactttgggccctcagggtatgcacccgtcactggcatgtgtcaccccctgaggagctgtgccctcaaccatgaggatggcttctcctcagccttcgtgatagctcatgagaccggccacgtgctcggcatggagcatgacggtcaggggaatggctgtgcagatgagaccagcctgggcagcgtcatggcgcccctggtgcaggctgccttccaccgcttccattggtcccgctgcagcaagctggagctcagccgctacctcccctcctacgactgcctcctcgatgacccctttgatcctgcctggccccagcccccagagctgcctgggatcaactactcaatggatgagcagtgccgctttgactttggcagtggctaccagacctgcttggcattcaggacctttgagccctgcaagcagctgtggtgcagccatcctgacaaccmgtayttctgcaagaccaagaaggggcccccgctggatgggactgagtgtgcacccggcaagtggtgcttcaaaggtcactgcatctggaagtcgccggagcagacatatggccaggatggaggctggagctcctggaccaagtttgggtcatgttcgcggtcatgtgggggcggggtgcgatcccgcagccggagctgcaacaacccctccccagcctatggaggccgccygtgcttagggcccatgttcgagtaccaggtctgcaacagcgaggagtgccctgggacctacgaggacttccgggcccagcagtgtgccaagcgcaactcstactatgtgcaccagaatgccaagcacagstgggtgccctacgagcctgacgatgacgcccagaagtgtgagctgatctgccagtcggcggacacrggggacgtggtgttcatgaaccaggtggttcacgatgggacacgctgcagctaccgggacccatacagcgtctgtgcgcgtggcgagtgtgtgcctgtcggctgtgacaaggaggtggggtccatgaaggcggatgacaagtgtggagtctgcgggggtgacaactcccactgcaggactgtgaaggggacgctgggcaaggcctccaagcaggcaggagctctcaagctggtgcagatcccagcaggtgccaggcacatccagattgaggcactggagaagtccccccaccgswywgtggtgaagaaccaggtcaccggcagcttcatcctcaaccccaagggcaaggaagccacaagccggaccttcaccgccatgggcctggagtgggaggatgcggtggaggatgccaaggaaagcctcaagaccagcgggcccctgcctgaagccattgccatcctggctctccccccaactgagggtggcccccgcagcagcctggcctacaagtacgtcatccatgaggacctgctgccccttatcgggagcaacaatgtgctcctggaggagatggacacctatgagtgggcgctcaagagctgggccccctgcagcaaggcctgtggaggagggatccagttcaccaaatacggctgccggcgcagacgagaccaccacatggtgcagcgacacctgtgtgaccacaagaagaggcccaagcccatccgccggcgctgcaaccagcacccgtgctctcagcctgtgtgggtgacggaggagtggggtgcctgcagccggagctgtgggaagctgggggtgcagacacgggggatacagtgcctgctgcccctctccaatggaacccacaaggtcatgccggccaaagcctgcgccggggaccggcctgaggcccgacggccctgtctccgagtgccctgcccagcccagtggaggctgggagcctggtcccagtgctctgccacctgtggagagggcatccagcagcggcaggtggtgtgcaggaccaacgccaacagcctcgggcattgcgagggggataggccagacactgtccaggtctgcarcctgcccgcctgtggaggaaatcaccagaactccacggtgagggccgatgtctgggaacttgggacgccagaggggcagtgggtgccacaatctgracccctacatcccattaacaagatatcatcaatgtgtgcagcggagccctgcacgggagacaggtctgtcttctgccagatggaagtgctcgatcgctactgctccattcccggctaccaccggctctgctgtgtgtcctgcatcaagaaggcctcgggccccaaccctggcccagaccctggcccaacctcactgccccccttctccactcctggaagccccttaccaggaccccaggaccctgcagatgctgcagagcctcctggaaagccaacgggatcagaggaccatcagcatggccgagccacacagctcccaggagctctggatacaagctccccagggacccagcatccctttgcccctgagacaccaatccctggagcatcctggagcatctcccctaccacccccggggggctgccttggggctggactcagacacctacgccagtccctgaggacaaagggcaacctggagaagacctgagacatcccggcaccagcctccctgctgacctgcccgggcggccgcccgagccctgccatcccactggcacgtttacactctgtgtactgccccgtgactcccagctcagaggacacacatagcagggcaggcgcaagcacagacttcattttaaatcattcgccttcttctcgtttggggctgtgatgctctttaccccacaaagcggggtgggaggaagacaaagatcagggaaagccctaatcggagatacctcagcaagctgcccccggcgggactgaccctctcagggcccctgttggtctcccctgccaagaccagggtcaactattgctccctcctcacagaccctgggcctgggcaggtctgaatcccggctggtctgtagctrgaagctgtcagggctgcctgccttcccggaactgtgaggacccctgtggagg

SEQ ID NO: 161 - DNA, 5724 bp, Homo sapiens
  CDS (1)...(5724)
atgcagtttgtatcctgggccacactgctaacgctcctggtgcgggacctggccgagatggggagcccagacgccgcggcggccgtgcgcaaggacaggctgcacccgaggcaagtgaaattattagagaccctgagcgaatacgaaatcgtgtctcccatccgagtgaacgctctcggagaaccctttcccacgaacgtccacttcaaaagaacgcgacggagcattaactctgccactgacccctggcctgccttcgcctcctcctcttcctcctctacctccwcccaggcgcattaccgcctctctgccttcggccagcagtttctatttaatctcaccgccaatgccggatttatcgctccactgttcactgtcaccctcctcgggacgcccggggtgaatcagaccaagttttattccgaagaggaagcggaactcaagcactgtttctacaaaggctatgtcaataccaactccgagcacacggccgtcatcagcctctgctcaggaatgctgggcacattccggtctcatgatggggattattttattgaaccactacagtctatggatgaacaagaagatgaagaggaacaaaacaaaccccacatcatttataggcgcagcgccccccagagagagccctcaacaggaaggcatgcatgtgacacctcagaacacaaaaataggcacagtaaagacaagaagaaaaccagagcaagaaaatggggagaaaggattaacctggctggtgacgtagcagcattaaacagcggcttagcaacagaggcattttctgcttatggtaataagacggacaacacaagagaaaagaggacccacagaaggacaaaacgttttttatcctatccacggtttgtagaagtcttggtggtggcagacaacagaatggtttcataccatggagaaaaccttcaacactatattttaactttaatgtcaattgatgggccttccatatcttttaatgctcagacaacattaaaaaacttttgccagtggcagcattcgaagaacagtccaggtggaatccatcatgatactgctgttctcttaacaagacaggatatctgcagagctcacgacaaatgtgataccttaggcctggctgaactgggaaccatttgtgatccctatagaagctgttctattagtgaagatagtggattgagtacagcttttacgatcgcccatgagctgggccatgtgtttaacatgcctcatgatgacaacaacaaatgtaaagaagaaggagttaagagtccccagcatgtcatggctccaacactgaacttctacaccaacccctggatgtggtcaaagtgtagtcgaaaatatatcactgagtttttagacactggttatggcgagtgtttgcttaacgaacctgaatccagaccctaccctttgcctgtccaactgccaggcatcctttacaacgtgaataaacaatgtgaattgatttttggaccaggttctcaggtgtgcccatatatgatgcagtgcagacggctctggtgcaataacgtcaatggagtacacaaaggctgccggactcagcacacaccctgggccgatgggacggagtgcgagcctggaaagcactgcaagtatggattttgtgttcccaaagaaatggatgtccccgtgacagatggatcctggggaagttggagtccctttggaacctgctccagaacatgtggagggggcatcaaaacagccattcgagagtgcaacagaccagaaccaaaaaatggtggaaaatactgtgtaggacgtagaatgaaatttaagtcctgcaacacggagccatgtctcaagcagaagcgagacttccgagatgaacagtgtgctcactttgacgggaagcattttaacatcaacggtctgcttcccaatgtgcgctgggtccctaaatacagtggaattctgatgaaggaccggtgcaagttgttctgcagagtggcagggaacacagcctactatcagcttcgagacagagtgatagatggaactccttgtggccaggacacaaatgatatctgtgtccagggcctttgccggcaagctggatgcgatcatgttttaaactcaaaagcccggagagataaatgtggggtttgtggtggcgataattcttcatgcaaaacagtggcaggaacatttaatacagtacattatggttacaatactgtggtccgaattccagctggtgctaccaatattgatgtgcggcagcacagtttctcaggggaaacagacgatgacaactacttagctttatcaagcagtaaaggtgaattcttgctaaatggaaactttgttgtcacaatggccaaaagggaaattcgcattgggaatgctgtggtagagtacagtgggtccgagactgccgtagaaagaattaactcaacagatcgcattgagcaagaacttttgcttcaggttttgtcggtgggaaagttgtacaaccccgatgtacgctattctttcaatattccaattgaagataaacctcagcagttttactggaacagtcatgggccatggcaagcatgcagtaaaccctgccaaggggaacggaaacgaaaacttgtttgcaccagggaatctgatcagcttactgtttctgatcaaagatgcgatcggctgccccagcctggacacattactgaaccctgtggtacagactgtgacctgaggtggcatgttgccagcaggagtgaatgtagtgcccagtgtggcttgggttaccgcacattggacatctactgtgccaaatatagcaggctggatgggaagactgagaaggttgatgatggtttttgcagcagccatcccaaaccaagcaaccgtgaaaaatgctcaggggaatgtaacacgggtggctggcgctattctgcctggactgaatgttcaaaaagctgtgacggtgggacccagaggagaagggctatttgtgtcaatacccgaaatgatgtactggatgacagcaaatgcacacatcaagagaaagttaccattcagaggtgcagtgagttcccttgtccacagtggaaatctggagactggtcagagtgcttggtcacctgtggaaaagggcataagcaccgccaggtctggtgtcagtttggtgaagatcgattaaatgatagaatgtgtgaccctgagaccaagccaacatctatgcagacttgtcagcagccggaatgtgcatcctggcaggcgggtccctggggacagtgcagtgtcacttgtggacagggataccagctaagagcagtgaaatgcatcattgggacttatatgtcagtggtagatgacaatgactgtaatgcagcaactagaccaactgatacccaggactgtgaattaccatcatgtcatcctcccccagctgccccggaaacgaggagaagcacatacagtgcaccaagaacccagtggcgatttgggtcttggaccccatgctcagccacttgtgggaaaggtacccggatgagatacgtcagctgccgagatgagaatggctctgtggctgacgagagtgcctgtgctaccctgcctagaccagtggcaaaggaagaatgttctgtgacaccctgtgggcaatggaaggccttggactggagctcttgctctgtgacctgtgggcaaggtagggcaacccggcaagtgatgtgtgtcaactacagtgaccacgtgatygatcggagtgagtgtgaccaggattatatcccagaaactgaccaggactgttccatgtcaccatgccctcaaaggaccccagacagtggcttagctcagcaccccttccaaaatgaggactatcgtccccggagcgccagccccagccgcacccatgtgctcggtggaaaccagtggagaactggcccctggggagcatgttccagtacctgtgctggcggatcccagcggcgtgttgttgtatgtcaggatgaaaatggatacaccgcaaacgactgtgtggagagaataaaacctgatgagcaaagagcctgtgaatccggcccttgtcctcagtgggcttatggcaactggggagagtgcactaagctgtgtggtggaggcataagaacaagactggtggtctgtcagcggtccaacggtgaacggtttccagatttgagctgtgaaattcttgataaacctcccgatcgtgagcagtgtaacacacatgcttgtccacacgacgctgcatggagtactggcccttggagctcgtgttctgtctcttgtggtcgagggcataaacaacgaaatgtttactgcatggcaaaagatggaagccatttagaaagtgattactgtaagcacctggctaagccacatgggcacagaaagtgccgaggaggaagatgccccaaatggaaagctggcgcttggagtcagtgctctgtgtcctgtggccgaggcgtacagcagaggcatgtgggctgtcagatcggaacacacaaaatagccagagagaccgagtgcaacccatacaccagaccggagtcggaacgcgactgccaaggcccacggtgtcccctctacacttggagggcagaggaatggcaagaatgcaccaagacctgcggcgaaggctccaggtaccgcaaggtggtgtgtgtggatgacaacaaaaacgaggtgcatggggcacgctgtgacgtgagcaagcggccggtggaccgtgaaagctgtagtttgcaaccctgcgagtatgtctggatcacaggagaatggtcagagtgctcagtgacctgtggaaaaggctacaaacaaaggcttgtctcgtgcagcgagatttacaccgggaaggagaattatgaatacagctaccaaaccaccatcaactgcccaggcacgcagccccccagtgttcacccctgttacctgagggactgccctgtctcggccacctggagagttggcaactgggggagctgctcagtgtcttgtggtgttggagtgatgcagagatctgtgcaatgtttaaccaatgaggaccaacccagccacttatgccacactgatctgaagccagaagaacgaaaaacctgccgtaatgtctataactgtgagttaccccagaattgcaaggaggtaaaaagacttaaaggtgccagtgaagatggtgaatatttcctgatgattagaggaaagcttctgaagatattctgtgcggggatgcactctgaccaccccaaagagtacgtgacactggtgcatggagactctgagaatttctccgaggtttatgggcacaggttacacaacccaacagaatgtccctataacgggagccggcgcgatgactgccaatgtcggaaggattacacggccgctgggttttccagttttcagaaaatcagaatagacctgaccagcatgcagataatcaccactgacttacagtttgcaaggacaagcgaaggacatcccgtcccttttgccacagccggggattgctacagcgctgccaagtgcccacagggtcgttttagcatcaacctttatggaaccggcttgtctttaactgaatctgccagatggatatcacaagggaattatgctgtctctgacatcaagaagtcgccggatggtacccgagtcgtagggaaatgcggtggttactgtggaaaatgcactccatcctctggtactggcctggaggtgcgagttttatag

SEQ ID NO: 162 - protein, 1907 aa, Homo sapiens
  VARIANT (1)...(1907): Xaa = Any Amino Acid
MQFVSWATLLTLLVRDLAEMGSPDAAAAVRKDRLHPRQVKLLETLSEYEIVSPIRVNALGEPFPTNVHFKRTRRSINSATDPWPAFASSSSSSTSXQAHYRLSAFGQQFLFNLTANAGFIAPLFTVTLLGTPGVNQTKFYSEEEAELKHCFYKGYVNTNSEHTAVISLCSGMLGTFRSHDGDYFIEPLQSMDEQEDEEEQNKPHIIYRRSAPQREPSTGRHACDTSEHKNRHSKDKKKTRARKWGERINLAGDVAALNSGLATEAFSAYGNKTDNTREKRTHRRTKRFLSYPRFVEVLVVADNRMVSYHGENLQHYILTLMSIDGPSISFNAQTTLKNFCQWQHSKNSPGGIHHDTAVLLTRQDICRAHDKCDTLGLAELGTICDPYRSCSISEDSGLSTAFTIAHELGHVFNMPHDDNNKCKEEGVKSPQHVMAPTLNFYTNPWMWSKCSRKYITEFLDTGYGECLLNEPESRPYPLPVQLPGILYNVNKQCELIFGPGSQVCPYMMQCRRLWCNNVNGVHKGCRTQHTPWADGTECEPGKHCKYGFCVPKEMDVPVTDGSWGSWSPFGTCSRTCGGGIKTAIRECNRPEPKNGGKYCVGRRMKFKSCNTEPCLKQKRDFRDEQCAHFDGKHFNINGLLPNVRWVPKYSGILMKDRCKLFCRVAGNTAYYQLRDRVIDGTPCGQDTNDICVQGLCRQAGCDHVLNSKARRDKCGVCGGDNSSCKTVAGTFNTVHYGYNTVVRIPAGATNIDVRQHSFSGETDDDNYLALSSSKGEFLLNGNFVVTMAKREIRIGNAVVEYSGSETAVERINSTDRIEQELLLQVLSVGKLYNPDVRYSFNIPIEDKPQQFYWNSHGPWQACSKPCQGERKRKLVCTRESDQLTVSDQRCDRLPQPGHITEPCGTDCDLRWHVASRSECSAQCGLGYRTLDIYCAKYSRLDGKTEKVDDGFCSSHPKPSNREKCSGECNTGGWRYSAWTECSKSCDGGTQRRRAICVNTRNDVLDDSKCTHQEKVTIQRCSEFPCPQWKSGDWSECLVTCGKGHKHRQVWCQFGEDRLNDRMCDPETKPTSMQTCQQPECASWQAGPWGQCSVTCGQGYQLRAVKCIIGTYMSVVDDNDCNAATRPTDTQDCELPSCHPPPAAPETRRSTYSAPRTQWRFGSWTPCSATCGKGTRMRYVSCRDENGSVADESACATLPRPVAKEECSVTPCGQWKALDWSSCSVTCGQGRATRQVMCVNYSDHVXDRSECDQDYIPETDQDCSMSPCPQRTPDSGLAQHPFQNEDYRPRSASPSRTHVLGGNQWRTGPWGACSSTCAGGSQRRVVVCQDENGYTANDCVERIKPDEQRACESGPCPQWAYGNWGECTKLCGGGIRTRLVVCQRSNGERFPDLSCEILDKPPDREQCNTHACPHDAAWSTGPWSSCSVSCGRGHKQRNVYCMAKDGSHLESDYCKHLAKPHGHRKCRGGRCPKWKAGAWSQCSVSCGRGVQQRHVGCQIGTHKIARETECNPYTRPESERDCQGPRCPLYTWRAEEWQECTKTCGEGSRYRKVVCVDDNKNEVHGARCDVSKRPVDRESCSLQPCEYVWITGEWSECSVTCGKGYKQRLVSCSEIYTGKENYEYSYQTTINCPGTQPPSVHPCYLRDCPVSATWRVGNWGSCSVSCGVGVMQRSVQCLTNEDQPSHLCHTDLKPEERKTCRNVYNCELPQNCKEVKRLKGASEDGEYFLMIRGKLLKIFCAGMHSDHPKEYVTLVHGDSENFSEVYGHRLHNPTECPYNGSRRDDCQCRKDYTAAGFSSFQKIRIDLTSMQIITTDLQFARTSEGHPVPFATAGDCYSAAKCPQGRFSINLYGTGLSLTESARWISQGNYAVSDIKKSPDGTRVVGKCGGYCGKCTPSSGTGLEVRVL

SEQ ID NO: 163 - DNA, 6060 bp, Homo sapiens
ccggcgcgcctcggagcgcaagttcctcgccttctcctgcccgctcgctgggcattatgcggccaagcagccgagccccagtcctcctcctcctcctgctcctccggctcctcctgcgggcccgagcggctcagctctcggcaggcggcggcgttgttcagccgagcgcagacgggaccctcgcagcgagacctcaagcgactcctaaagtcaaaagttggcggcgggcgccgggctccgcgcgctctccacggccgctgcctcgcgtcgccgccgcagccaaggagggcaggagggaggggggtgggggcagcggagggaggggtgggaagcaccatgcagtttgtatcctgggccacactgctaacgctcctggtgcgggacctggccgagatggggagcccagacgccgcggcggccgtgcgcaaggacaggctgcacccgaggcaagtgaaattattagagaccctgagcgaatacgaaatcgtgtctcccatccgagtgaacgctctcggagaaccctttcccacgaacgtccacttcaaaagaacgcgacggagcattaactctgccactgacccctggcctgccttcgcctcctcctcttcctcctctacctccwcccaggcgcattaccgcctctctgccttcggccagcagtttctatttaatctcaccgccaatgccggatttatcgctccactgttcactgtcaccctcctcgggacgcccggggtgaatcagaccaagttttattccgaagaggaagcggaactcaagcactgtttctacaaaggctatgtcaataccaactccgagcacacggccgtcatcagcctctgctcaggaatgctgggcacattccggtctcatgatggggattattttattgaaccactacagtctatggatgaacaagaagatgaagaggaacaaaacaaaccccacatcatttataggcgcagcgccccccagagagagccctcaacaggaaggcatgcatgtgacacctcagaacacaaaaataggcacagtaaagacaagaagaaaaccagagcaagaaaatggggagaaaggattaacctggctggtgacgtagcagcattaaacagcggcttagcaacagaggcattttctgcttatggtaataagacggacaacacaagagaaaagaggacccacagaaggacaaaacgttttttatcctatccacggtttgtagaagtcttggtggtggcagacaacagaatggtttcataccatggagaaaaccttcaacactatattttaactttaatgtcaattgatgggccttccatatcttttaatgctcagacaacattaaaaaacttttgccagtggcagcattcgaagaacagtccaggtggaatccatcatgatactgctgttctcttaacaagacaggatatctgcagagctcacgacaaatgtgataccttaggcctggctgaactgggaaccatttgtgatccctatagaagctgttctattagtgaagatagtggattgagtacagcttttacgatcgcccatgagctgggccatgtgtttaacatgcctcatgatgacaacaacaaatgtaaagaagaaggagttaagagtccccagcatgtcatggctccaacactgaacttctacaccaacccctggatgtggtcaaagtgtagtcgaaaatatatcactgagtttttagacactggttatggcgagtgtttgcttaacgaacctgaatccagaccctaccctttgcctgtccaactgccaggcatcctttacaacgtgaataaacaatgtgaattgatttttggaccaggttctcaggtgtgcccatatatgatgcagtgcagacggctctggtgcaataacgtcaatggagtacacaaaggctgccggactcagcacacaccctgggccgatgggacggagtgcgagcctggaaagcactgcaagtatggattttgtgttcccaaagaaatggatgtccccgtgacagatggatcctggggaagttggagtccctttggaacctgctccagaacatgtggagggggcatcaaaacagccattcgagagtgcaacagaccagaaccaaaaaatggtggaaaatactgtgtaggacgtagaatgaaatttaagtcctgcaacacggagccatgtctcaagcagaagcgagacttccgagatgaacagtgtgctcactttgacgggaagcattttaacatcaacggtctgcttcccaatgtgcgctgggtccctaaatacagtggaattctgatgaaggaccggtgcaagttgttctgcagagtggcagggaacacagcctactatcagcttcgagacagagtgatagatggaactccttgtggccaggacacaaatgatatctgtgtccagggcctttgccggcaagctggatgcgatcatgttttaaactcaaaagcccggagagataaatgtggggtttgtggtggcgataattcttcatgcaaaacagtggcaggaacatttaatacagtacattatggttacaatactgtggtccgaattccagctggtgctaccaatattgatgtgcggcagcacagtttctcaggggaaacagacgatgacaactacttagctttatcaagcagtaaaggtgaattcttgctaaatggaaactttgttgtcacaatggccaaaagggaaattcgcattgggaatgctgtggtagagtacagtgggtccgagactgccgtagaaagaattaactcaacagatcgcattgagcaagaacttttgcttcaggttttgtcggtgggaaagttgtacaaccccgatgtacgctattctttcaatattccaattgaagataaacctcagcagttttactggaacagtcatgggccatggcaagcatgcagtaaaccctgccaaggggaacggaaacgaaaacttgtttgcaccagggaatctgatcagcttactgtttctgatcaaagatgcgatcggctgccccagcctggacacattactgaaccctgtggtacagactgtgacctgaggtggcatgttgccagcaggagtgaatgtagtgcccagtgtggcttgggttaccgcacattggacatctactgtgccaaatatagcaggctggatgggaagactgagaaggttgatgatggtttttgcagcagccatcccaaaccaagcaaccgtgaaaaatgctcaggggaatgtaacacgggtggctggcgctattctgcctggactgaatgttcaaaaagctgtgacggtgggacccagaggagaagggctatttgtgtcaatacccgaaatgatgtactggatgacagcaaatgcacacatcaagagaaagttaccattcagaggtgcagtgagttcccttgtccacagtggaaatctggagactggtcagagtgcttggtcacctgtggaaaagggcataagcaccgccaggtctggtgtcagtttggtgaagatcgattaaatgatagaatgtgtgaccctgagaccaagccaacatctatgcagacttgtcagcagccggaatgtgcatcctggcaggcgggtccctggggacagtgcagtgtcacttgtggacagggataccagctaagagcagtgaaatgcatcattgggacttatatgtcagtggtagatgacaatgactgtaatgcagcaactagaccaactgatacccaggactgtgaattaccatcatgtcatcctcccccagctgccccggaaacgaggagaagcacatacagtgcaccaagaacccagtggcgatttgggtcttggaccccatgctcagccacttgtgggaaaggtacccggatgagatacgtcagctgccgagatgagaatggctctgtggctgacgagagtgcctgtgctaccctgcctagaccagtggcaaaggaagaatgttctgtgacaccctgtgggcaatggaaggccttggactggagctcttgctctgtgacctgtgggcaaggtagggcaacccggcaagtgatgtgtgtcaactacagtgaccacgtgatygatcggagtgagtgtgaccaggattatatcccagaaactgaccaggactgttccatgtcaccatgccctcaaaggaccccagacagtggcttagctcagcaccccttccaaaatgaggactatcgtccccggagcgccagccccagccgcacccatgtgctcggtggaaaccagtggagaactggcccctggggagcatgttccagtacctgtgctggcggatcccagcggcgtgttgttgtatgtcaggatgaaaatggatacaccgcaaacgactgtgtggagagaataaaacctgatgagcaaagagcctgtgaatccggcccttgtcctcagtgggcttatggcaactggggagagtgcactaagctgtgtggtggaggcataagaacaagactggtggtctgtcagcggtccaacggtgaacggtttccagatttgagctgtgaaattcttgataaacctcccgatcgtgagcagtgtaacacacatgcttgtccacacgacgctgcatggagtactggcccttggagctcgtgttctgtctcttgtggtcgagggcataaacaacgaaatgtttactgcatggcaaaagatggaagccatttagaaagtgattactgtaagcacctggctaagccacatgggcacagaaagtgccgaggaggaagatgccccaaatggaaagctggcgcttggagtcagtgctctgtgtcctgtggccgaggcgtacagcagaggcatgtgggctgtcagatcggaacacacaaaatagccagagagaccgagtgcaacccatacaccagaccggagtcggaacgcgactgccaaggcccacggtgtcccctctacacttggagggcagaggaatggcaagaatgcaccaagacctgcggcgaaggctccaggtaccgcaaggtggtgtgtgtggatgacaacaaaaacgaggtgcatggggcacgctgtgacgtgagcaagcggccggtggaccgtgaaagctgtagtttgcaaccctgcgagtatgtctggatcacaggagaatggtcagagtgctcagtgacctgtggaaaaggctacaaacaaaggcttgtctcgtgcagcgagatttacaccgggaaggagaattatgaatacagctaccaaaccaccatcaactgcccaggcacgcagccccccagtgttcacccctgttacctgagggactgccctgtctcggccacctggagagttggcaactgggggagctgctcagtgtcttgtggtgttggagtgatgcagagatctgtgcaatgtttaaccaatgaggaccaacccagccacttatgccacactgatctgaagccagaagaacgaaaaacctgccgtaatgtctataactgtgagttaccccagaattgcaaggaggtaaaaagacttaaaggtgccagtgaagatggtgaatatttcctgatgattagaggaaagcttctgaagatattctgtgcggggatgcactctgaccaccccaaagagtacgtgacactggtgcatggagactctgagaatttctccgaggtttatgggcacaggttacacaacccaacagaatgtccctataacgggagccggcgcgatgactgccaatgtcggaaggattacacggccgctgggttttccagttttcagaaaatcagaatagacctgaccagcatgcagataatcaccactgacttacagtttgcaaggacaagcgaaggacatcccgtcccttttgccacagccggggattgctacagcgctgccaagtgcccacagggtcgttttagcatcaacctttatggaaccggcttgtctttaactgaatctgccagatggatatcacaagggaattatgctgtctctgacatcaagaagtcgccggatggtacccgagtcgtagggaaatgcggtggttactgtggaaaatgcactccatcctctggtactggcctggaggtgcgagttttatag

SEQ ID NO: 164 - DNA, 966 bp, Homo sapiens
  CDS (1)...(966)
atgcttctgctgggcatcctaaccctggctttcgccgggcgaaccgctggaggctctgagccagagcgggaggtagtcgttcccatccgactggacccggacattaacggccgccgctactactggcggggtcccgaggactccggggatcagggactcatttttcagatcacagcatttcaggaggacttttacctacacctgacgccggatgctcagttcttggctcccgccttctccactgagcatctgggcgtccccctccaggggctcaccgggggctcttcagacctgcgacgctgcttctattctggggacgtgaacgccgagccggactcgttcgctgctgtgagcctgtgcggggggctccgcggagcctttggctaccgaggcgccgagtatgtcattagcccgctgcccaatgctagcgcgccggcggcgcagcgcaacagccagggcgcacaccttctccagcgccggggtgttccgggcgggccttccggagaccccacctctcgctgcggggtggcctcgggctggaaccccgccatcctacgggccctggacccttacaagccgcggcgggcgggcttcggggagagtcgtagccggcgcaggtctgggcgcgccaagcgtttcgtgtctatcccgcggtacgtggagacgctggtggtcgcggacgagtcaatggtcaagttccacggcgcggacctggaacattatctgctgacgctgctggcaacggcggcgcgactctaccgccatcccagcatcctcaaccccatcaacatcgttgtggtcaaggtgctgcttcttagagatcgtgactccgggcccaaggtcaccggcaatgcggccctgacgctgcgcaacttctgtgcctggcagaagaagctgaacaaagtgagtgacaagcaccccgagtactgggacactgccatcctcttcaccaggcaggagagttga

SEQ ID NO: 165 - protein, 321 aa, Homo sapiens
MLLLGILTLAFAGRTAGGSEPEREVVVPIRLDPDINGRRYYWRGPEDSGDQGLIFQITAFQEDFYLHLTPDAQFLAPAFSTEHLGVPLQGLTGGSSDLRRCFYSGDVNAEPDSFAAVSLCGGLRGAFGYRGAEYVISPLPNASAPAAQRNSQGAHLLQRRGVPGGPSGDPTSRCGVASGWNPAILRALDPYKPRRAGFGESRSRRRSGRAKRFVSIPRYVETLVVADESMVKFHGADLEHYLLTLLATAARLYRHPSILNPINIVVVKVLLLRDRDSGPKVTGNAALTLRNFCAWQKKLNKVSDKHPEYWDTAILFTRQES

SEQ ID NO: 166 - DNA, 2853 bp, Homo sapiens
  CDS (1)...(2853)
atgcttctgctgggcatcctaaccctggctttcgccgggcgaaccgctggaggctctgagccagagcgggaggtagtcgttcccatccgactggacccggacattaacggccgccgctactactggcggggtcccgaggactccggggatcagggactcatttttcagatcacagcatttcaggaggacttttacctacacctgacgccggatgctcagttcttggctcccgccttctccactgagcatctgggcgtccccctccaggggctcaccgggggctcttcagacctgcgacgctgcttctattctggggacgtgaacgccgagccggactcgttcgctgctgtgagcctgtgcggggggctccgcggagcctttggctaccgaggcgccgagtatgtcattagcccgctgcccaatgctagcgcgccggcggcgcagcgcaacagccagggcgcacaccttctccagcgccggggtgttccgggcgggccttccggagaccccacctctcgctgcggggtggcctcgggctggaaccccgccatcctacgggccctggacccttacaagccgcggcgggcgggcttcggggagagtcgtagccggcgcaggtctgggcgcgccaagcgtttcgtgtctatcccgcggtacgtggagacgctggtggtcgcggacgagtcaatggtcaagttccacggcgcggacctggaacattatctgctgacgctgctggcaacggcggcgcgactctaccgccatcccagcatcctcaaccccatcaacatcgttgtggtcaaggtgctgcttcttagagatcgtgactccgggcccaaggtcaccggcaatgcggccctgacgctgcgcaacttctgtgcctggcagaagaagctgaacaaagtgagtgacaagcaccccgagtactgggacactgccatcctcttcaccaggcaggacctgtgtggagccaccacctgtgacaccctgggcatggctgatgtgggtaccatgtgtgaccccaagagaagctgctctgtcattgaggacgatgggcttccatcagccttcaccactgcccacgagctgggccacgtgttcaacatgccccatgacaatgtgaaagtctgtgaggaggtgtttgggaagctccgagccaaccacatgatgtccccgaccctcatccagatcgaccgtgccaacccctggtcagcctgcagtgctgccatcatcaccgacttcctggacagcgggcacggtgactgcctcctggaccaacccagcaagcccatctccctgcccgaggatctgccgggcgccagctacaccctgagccagcagtgcgagctggcttttggcgtgggctccaagccctgtccttacatgcagtactgcaccaagctgtggtgcaccgggaaggccaagggacagatggtgtgccagacccgccacttcccctgggccgatggcaccagctgtggcgagggcaagctctgcctcaaaggggcctgcgtggagagacacaacctcaacaagcacagggtggatggttcctgggccaaatgggatccctatggcccctgctcgcgcacatgtggtgggggcgtgcagctggccaggaggcagtgcaccaaccccacccctgccaacgggggcaagtactgcgagggagtgagggtgaaataccgatcctgcaatctggagccctgccccagctcagcctccggaaagagcttccgggaggagcagtgtgaggctttcaacggctacaaccacagcaccaaccggctcactctcgccgtggcatgggtgcccaagtactccggcgtgtctccccgggacaagtgcaagctcatctgccgagccaatggcactggctacttctatgtgctggcacccaaggtggtggacggcacgctgtgctctcctgactccacctccgtctgtgtccaaggcaagtgcatcaaggctggctgtgatgggaacctgggctccaagaagagattcgacaagtgtggggtgtgtgggggagacaataagagctgcaagaaggtgactggactcttcaccaagcccatgcatggctacaatttcgtggtggccatccccgcaggcgcctcaagcatcgacatccgccagcgcggttacaaagggctgatcggggatgacaactacctggctctgaagaacagccaaggcaagtacctgctcaacgggcatttcgtggtgtcggcggtggagcgggacctggtggtgaagggcagtctgctgcggtacagcggcacgggcacagcggtggagagcctgcaggcttcccggcccatcctggagccgctgaccgtggaggtcctctccgtggggaagatgacaccgccccgggtccgctactccttctatctgcccaaagagcctcgggaggacaagtcctctcatcccaaggacccccggggaccctctgtcttgcacaacagcgtcctcagcctctccaaccaggtggagcagccggacgacaggccccctgcacgctgggtggctggcagctgggggccgtgctccgcgagctgcggcagtggcctgcagaagcgggcggtggactgtcggggctccgccgggcagcgcacggtccctgcctgtgatgcagcccatcggcccgtggagacacaagcctgcggggagccctgccccacctgggagctcagcgcctggtcaccctgctccaagagctgcggccggggatttcagaggcgctcactcaagtgtgtgggccacggaggccggctgctggcccgggaccagtgcaacttgcaccgcaagccccaggagctggacttctgcgtcctgaggccgtgctga

SEQ ID NO: 167 - protein, 950 aa, Homo sapiens
MLLLGILTLAFAGRTAGGSEPEREVVVPIRLDPDINGRRYYWRGPEDSGDQGLIFQITAFQEDFYLHLTPDAQFLAPAFSTEHLGVPLQGLTGGSSDLRRCFYSGDVNAEPDSFAAVSLCGGLRGAFGYRGAEYVISPLPNASAPAAQRNSQGAHLLQRRGVPGGPSGDPTSRCGVASGWNPAILRALDPYKPRRAGFGESRSRRRSGRAKRFVSIPRYVETLVVADESMVKFHGADLEHYLLTLLATAARLYRHPSILNPINIVVVKVLLLRDRDSGPKVTGNAALTLRNFCAWQKKLNKVSDKHPEYWDTAILFTRQDLCGATTCDTLGMADVGTMCDPKRSCSVIEDDGLPSAFTTAHELGHVFNMPHDNVKVCEEVFGKLRANHMMSPTLIQIDRANPWSACSAAIITDFLDSGHGDCLLDQPSKPISLPEDLPGASYTLSQQCELAFGVGSKPCPYMQYCTKLWCTGKAKGQMVCQTRHFPWADGTSCGEGKLCLKGACVERHNLNKHRVDGSWAKWDPYGPCSRTCGGGVQLARRQCTNPTPANGGKYCEGVRVKYRSCNLEPCPSSASGKSFREEQCEAFNGYNHSTNRLTLAVAWVPKYSGVSPRDKCKLICRANGTGYFYVLAPKVVDGTLCSPDSTSVCVQGKCIKAGCDGNLGSKKRFDKCGVCGGDNKSCKKVTGLFTKPMHGYNFVVAIPAGASSIDIRQRGYKGLIGDDNYLALKNSQGKYLLNGHFVVSAVERDLVVKGSLLRYSGTGTAVESLQASRPILEPLTVEVLSVGKMTPPRVRYSFYLPKEPREDKSSHPKDPRGPSVLHNSVLSLSNQVEQPDDRPPARWVAGSWGPCSASCGSGLQKRAVDCRGSAGQRTVPACDAAHRPVETQACGEPCPTWELSAWSPCSKSCGRGFQRRSLKCVGHGGRLLARDQCNLHRKPQELDFCVLRPC

SEQ ID NO: 168 - DNA, 1104 bp, Homo sapiens
  CDS (1)...(1104)
atgcttctgctgggcatcctaaccctggctttcgccgggcgaaccgctggaggctctgagccagagcgggaggtagtcgttcccatccgactggacccggacattaacggccgccgctactactggcggggtcccgaggactccggggatcagggactcatttttcagatcacagcatttcaggaggacttttacctacacctgacgccggatgctcagttcttggctcccgccttctccactgagcatctgggcgtccccctccaggggctcaccgggggctcttcagacctgcgacgctgcttctattctggggacgtgaacgccgagccggactcgttcgctgctgtgagcctgtgcggggggctccgcggagcctttggctaccgaggcgccgagtatgtcattagcccgctgcccaatgctagcgcgccggcggcgcagcgcaacagccagggcgcacaccttctccagcgccggggtgttccgggcgggccttccggagaccccacctctcgctgcggggtggcctcgggctggaaccccgccatcctacgggccctggacccttacaagccgcggcgggcgggcttcggggagagtcgtagccggcgcaggtctgggcgcgccaagcgtttcgtgtctatcccgcggtacgtggagacgctggtggtcgcggacgagtcaatggtcaagttccacggcgcggacctggaacattatctgctgacgctgctggcaacggcggcgcgactctaccgccatcccagcatcctcaaccccatcaacatcgttgtggtcaaggtgctgcttcttagagatcgtgactccgggcccaaggtcaccggcaatgcggccctgacgctgcgcaacttctgtgcctggcagaagaagctgaacaaagtgagtgacaagcaccccgagtactgggacactgccatcctcttcaccaggcaggacctgtgtggagccaccacctgtgacaccctgggcatggctgatgtgggtaccatgtgtgaccccaagagaagctgctctgtcattgaggacgatgggcttccatcagccttcaccactgcccacgagctgggtaaggctggataa

SEQ ID NO: 169 - protein, 367 aa, Homo sapiens
MLLLGILTLAFAGRTAGGSEPEREVVVPIRLDPDINGRRYYWRGPEDSGDQGLIFQITAFQEDFYLHLTPDAQFLAPAFSTEHLGVPLQGLTGGSSDLRRCFYSGDVNAEPDSFAAVSLCGGLRGAFGYRGAEYVISPLPNASAPAAQRNSQGAHLLQRRGVPGGPSGDPTSRCGVASGWNPAILRALDPYKPRRAGFGESRSRRRSGRAKRFVSIPRYVETLVVADESMVKFHGADLEHYLLTLLATAARLYRHPSILNPINIVVVKVLLLRDRDSGPKVTGNAALTLRNFCAWQKKLNKVSDKHPEYWDTAILFTRQDLCGATTCDTLGMADVGTMCDPKRSCSVIEDDGLPSAFTTAHELGKAG

SEQ ID NO: 170 - DNA, 3446 bp, Homo sapiens
gtggcgctgattgggccgtccaaagaggagggggcctttaataggctcgcccagcgcctggcttgctgcgctgcgagtggctgcggttgcgagaagccgcccggcaccttccgctagttctcggctgcaaatcttcgtccttgcacttgacagcgattgtacttaagctcccagggcgcgctttgcttggaaaggcacaggtaggaagcgcgggctgccgggtgcacgctcgccgccctgggaggagtctccctcccttggctctcctttctgggaactgccggctgtcccgtagcgttggcggttccagagtgcgggctgcacggagaccgcggcagcggccggagagcccggcccagccccttcccacagcgcggcggtgcgctgcccggcgccatgcttctgctgggcatcctaaccctggctttcgccgggcgaaccgctggaggctctgagccagagcgggaggtagtcgttcccatccgactggacccggacattaacggccgccgctactactggcggggtcccgaggactccggggatcagggactcatttttcagatcacagcatttcaggaggacttttacctacacctgacgccggatgctcagttcttggctcccgccttctccactgagcatctgggcgtccccctccaggggctcaccgggggctcttcagacctgcgacgctgcttctattctggggacgtgaacgccgagccggactcgttcgctgctgtgagcctgtgcggggggctccgcggagcctttggctaccgaggcgccgagtatgtcattagcccgctgcccaatgctagcgcgccggcggcgcagcgcaacagccagggcgcacaccttctccagcgccggggtgttccgggcgggccttccggagaccccacctctcgctgcggggtggcctcgggctggaaccccgccatcctacgggccctggacccttacaagccgcggcgggcgggcttcggggagagtcgtagccggcgcaggtctgggcgcgccaagcgtttcgtgtctatcccgcggtacgtggagacgctggtggtcgcggacgagtcaatggtcaagttccacggcgcggacctggaacattatctgctgacgctgctggcaacggcggcgcgactctaccgccatcccagcatcctcaaccccatcaacatcgttgtggtcaaggtgctgcttcttagagatcgtgactccgggcccaaggtcaccggcaatgcggccctgacgctgcgcaacttctgtgcctggcagaagaagctgaacaaagtgagtgacaagcaccccgagtactgggacactgccatcctcttcaccaggcaggacctgtgtggagccaccacctgtgacaccctgggcatggctgatgtgggtaccatgtgtgaccccaagagaagctgctctgtcattgaggacgatgggcttccatcagccttcaccactgcccacgagctgggccacgtgttcaacatgccccatgacaatgtgaaagtctgtgaggaggtgtttgggaagctccgagccaaccacatgatgtccccgaccctcatccagatcgaccgtgccaacccctggtcagcctgcagtgctgccatcatcaccgacttcctggacagcgggcacggtgactgcctcctggaccaacccagcaagcccatctccctgcccgaggatctgccgggcgccagctacaccctgagccagcagtgcgagctggcttttggcgtgggctccaagccctgtccttacatgcagtactgcaccaagctgtggtgcaccgggaaggccaagggacagatggtgtgccagacccgccacttcccctgggccgatggcaccagctgtggcgagggcaagctctgcctcaaaggggcctgcgtggagagacacaacctcaacaagcacagggtggatggttcctgggccaaatgggatccctatggcccctgctcgcgcacatgtggtgggggcgtgcagctggccaggaggcagtgcaccaaccccacccctgccaacgggggcaagtactgcgagggagtgagggtgaaataccgatcctgcaatctggagccctgccccagctcagcctccggaaagagcttccgggaggagcagtgtgaggctttcaacggctacaaccacagcaccaaccggctcactctcgccgtggcatgggtgcccaagtactccggcgtgtctccccgggacaagtgcaagctcatctgccgagccaatggcactggctacttctatgtgctggcacccaaggtggtggacggcacgctgtgctctcctgactccacctccgtctgtgtccaaggcaagtgcatcaaggctggctgtgatgggaacctgggctccaagaagagattcgacaagtgtggggtgtgtgggggagacaataagagctgcaagaaggtgactggactcttcaccaagcccatgcatggctacaatttcgtggtggccatccccgcaggcgcctcaagcatcgacatccgccagcgcggttacaaagggctgatcggggatgacaactacctggctctgaagaacagccaaggcaagtacctgctcaacgggcatttcgtggtgtcggcggtggagcgggacctggtggtgaagggcagtctgctgcggtacagcggcacgggcacagcggtggagagcctgcaggcttcccggcccatcctggagccgctgaccgtggaggtcctctccgtggggaagatgacaccgccccgggtccgctactccttctatctgcccaaagagcctcgggaggacaagtcctctcatcccaaggacccccggggaccctctgtcttgcacaacagcgtcctcagcctctccaaccaggtggagcagccggacgacaggccccctgcacgctgggtggctggcagctgggggccgtgctccgcgagctgcggcagtggcctgcagaagcgggcggtggactgtcggggctccgccgggcagcgcacggtccctgcctgtgatgcagcccatcggcccgtggagacacaagcctgcggggagccctgccccacctgggagctcagcgcctggtcaccctgctccaagagctgcggccggggatttcagaggcgctcactcaagtgtgtgggccacggaggccggctgctggcccgggaccagtgcaacttgcaccgcaagccccaggagctggacttctgcgtcctgaggccgtgctgagtggggtcatcgctttctccccctcactctccaccccactgatatgccagcgttctgccagctggagtagcgggcagaggacggtggccaggggctcacgccacgatgtcacccacatccggggacaaggaccatgggctggggcgagaggttccttcttcttcccttggactgggcaaaaagggaaaacccccagg

SEQ ID NO: 171 - DNA, 2010 bp, Homo sapiens
  CDS (1)...(2010)
atggcgtattaccaggagccttcagtggagacctccatcatcaagttcaaagaccaggactttaccaccttgcgggatcactgcctgagcatgggccggacgtttaaggatgagacattccctgcagcagattcttccataggccagaagctgctccaggaaaaacgcctctccaatgtgatatggaagcggccacaggatctaccagggggtcctcctcacttcatcctggatgatataagcagatttgacatccaacaaggaggcgcagctgactgctggttcctggcagcactgggatccttgactcagaacccacagtacaggcagaagatcctgatggtccaaagcttttcacaccagtatgctggcattttccgtttccggttctggcaatgtggccagtgggtggaagtggtgattgatgaccgcctacctgtccagggagataaatgcctctttgtgcgtcctcgccaccaaaaccaagagttctggccctgcctgctggagaaggcctatgccaagctgctcggatcctattccgatctgcactatggcttcctcgaggatgccctggtggacctcacaggaggcgtgatcaccaacatccatctgcactcttcccctgtggacctggtgaaggcagtgaagacagcgaccaaggcaggctccctgataacctgtgccactccaagtgggccaacagatacagcacaggcgatggagaatgggctggtgagtctccatgcctacactgtgactggggctgagcagattcaataccgaaggggctgggaagaaattatctccctgtggaacccctggggctggggcgagaccgaatggagagggcgctggagtgatgggtctcaggagtgggaggaaacctgtgatccgcggaaaagccagctacataagaaacgggaagatggcgagttttggatgtcatgtcaagatttccaacagaaattcatcgccatgtttatatgtagcgaaattccaattaccctggaccatggaaacacactccacgaaggatggtcccaaataatgtttaggaagcaagtgattctaggaaacactgcaggaggacctcggaatgatgctcaattcaacttctctgtgcaagagccaatggaaggcaccaatgttgtcgtgtgcgtcacagttgctgtcacaccatcaaatttgaaagcagaagatgcaaaatttccactcgatttccaagtgattctggctggctcacagcggttccgggagaaatttccacccgtgtttttttcctcgttcagaaacactgtccaaagctcaaataataaattccgccgcaacttcaccatgacttaccatctgagccctgggaactatgttgtggttgcacagacacggagaaaatcagcggagttcttgctccgaatcttcctgaaaatgccagacagtgacaggcacctgagcagccatttcaacctcagaatgaagggaagcccttcagaacatggctcccaacaaagcattttcaacagatatgctcagcagaggctggacattgatgccacccagcttcagggccttctcaaccaggagcttctaacaggacctccaggggacatgttctccttagatgagtgccgcagcttggtggctctgatggaactgaaagtgaatgggcggctagaccaagaggagtttgcgcgactgtggaagcgccttgttcactaccagcatgttttccagaaggttcagacaagccctggagtcctcctgagctcggacttgtggaaggccatagagaatacagacttcctcagagggatcttcatcagccgtgagctgctgcatctggtgaccctcaggtacagcgacagcgtcggcagggtcagcttccccagcctggtctgcttcctgatgcggcttgaagccatggcaaagaccttccgcaacctctctaaggatggaaaaggactctacctgacagaaatggagtggatgagcctggtcatgtacaactga

SEQ ID NO: 172 - protein, 669 aa, Homo sapiens
MAYYQEPSVETSIIKFKDQDFTTLRDHCLSMGRTFKDETFPAADSSIGQKLLQEKRLSNVIWKRPQDLPGGPPHFILDDISRFDIQQGGAADCWFLAALGSLTQNPQYRQKILMVQSFSHQYAGIFRFRFWQCGQWVEVVIDDRLPVQGDKCLFVRPRHQNQEFWPCLLEKAYAKLLGSYSDLHYGFLEDALVDLTGGVITNIHLHSSPVDLVKAVKTATKAGSLITCATPSGPTDTAQAMENGLVSLHAYTVTGAEQIQYRRGWEEIISLWNPWGWGETEWRGRWSDGSQEWEETCDPRKSQLHKKREDGEFWMSCQDFQQKFIAMFICSEIPITLDHGNTLHEGWSQIMFRKQVILGNTAGGPRNDAQFNFSVQEPMEGTNVVVCVTVAVTPSNLKAEDAKFPLDFQVILAGSQRFREKFPPVFFSSFRNTVQSSNNKFRRNFTMTYHLSPGNYVVVAQTRRKSAEFLLRIFLKMPDSDRHLSSHFNLRMKGSPSEHGSQQSIFNRYAQQRLDIDATQLQGLLNQELLTGPPGDMFSLDECRSLVALMELKVNGRLDQEEFARLWKRLVHYQHVFQKVQTSPGVLLSSDLWKAIENTDFLRGIFISRELLHLVTLRYSDSVGRVSFPSLVCFLMRLEAMAKTFRNLSKDGKGLYLTEMEWMSLVMYN

SEQ ID NO: 173 - DNA, 1062 bp, Homo sapiens
  CDS (1)...(1062)
atggcgtattaccaggagccttcagtggagacctccatcatcaagttcaaagaccaggactttaccaccttgcgggatcactgcctgagcatgggccggacgtttaaggatgagacattccctgcagcagattcttccataggccagaagctgctccaggaaaaacgcctctccaatgtgatatggaagcggccacaggatctaccagggggtcctcctcacttcatcctggatgatataagcagatttgacatccaacaaggaggcgcagctgactgctggttcctggcagcactgggatccttgactcagaacccacagtacaggcagaagatcctgatggtccaaagcttttcacaccagtatgctggcattttccgtttccggttctggcaatgtggccagtgggtggaagtggtgattgatgaccgcctacctgtccagggagataaatgcctctttgtgcgtcctcgccaccaaaaccaagagttctggccctgcctgctggagaaggcctatgccaagctgctcggatcctattccgatctgcactatggcttcctcgaggatgccctggtggacctcacaggaggcgtgatcaccaacatccatctgcactcttcccctgtggacctggtgaaggcagtgaagacagcgaccaaggcaggctccctgataacctgtgccactccaagtgggccaacagatacagcacaggcgatggagaatgggctggtgagtctccatgcctacactgtgactggggctgagcagattcaataccgaaggggctgggaagaaattatctccctgtggaacccctggggctggggcgagaccgaatggagagggcgctggagtgatgggtctcaggagtgggaggaaacctgtgatccgcggaaaagccagctacataagaaacgggaagatggcgagttttggatgtcatgtcaagatttccaacagaaattcatcgccatgtttatatgtagcgaaattccaattaccctggaccatggaaacacactccacgaaggatggtcccaaataatgtttaggtag

SEQ ID NO: 174 - protein, 353 aa, Homo sapiens
MAYYQEPSVETSIIKFKDQDFTTLRDHCLSMGRTFKDETFPAADSSIGQKLLQEKRLSNVIWKRPQDLPGGPPHFILDDISRFDIQQGGAADCWFLAALGSLTQNPQYRQKILMVQSFSHQYAGIFRFRFWQCGQWVEVVIDDRLPVQGDKCLFVRPRHQNQEFWPCLLEKAYAKLLGSYSDLHYGFLEDALVDLTGGVITNIHLHSSPVDLVKAVKTATKAGSLITCATPSGPTDTAQAMENGLVSLHAYTVTGAEQIQYRRGWEEIISLWNPWGWGETEWRGRWSDGSQEWEETCDPRKSQLHKKREDGEFWMSCQDFQQKFIAMFICSEIPITLDHGNTLHEGWSQIMFR

SEQ ID NO: 175 - DNA, 2185 bp, Homo sapiens
ggtctcccctcctccatcagacacacctgcctaggaagcaggaaaggacctcggaagtcttctaaggagagtcatggcgtattaccaggagccttcagtggagacctccatcatcaagttcaaagaccaggactttaccaccttgcgggatcactgcctgagcatgggccggacgtttaaggatgagacattccctgcagcagattcttccataggccagaagctgctccaggaaaaacgcctctccaatgtgatatggaagcggccacaggatctaccagggggtcctcctcacttcatcctggatgatataagcagatttgacatccaacaaggaggcgcagctgactgctggttcctggcagcactgggatccttgactcagaacccacagtacaggcagaagatcctgatggtccaaagcttttcacaccagtatgctggcattttccgtttccggttctggcaatgtggccagtgggtggaagtggtgattgatgaccgcctacctgtccagggagataaatgcctctttgtgcgtcctcgccaccaaaaccaagagttctggccctgcctgctggagaaggcctatgccaagctgctcggatcctattccgatctgcactatggcttcctcgaggatgccctggtggacctcacaggaggcgtgatcaccaacatccatctgcactcttcccctgtggacctggtgaaggcagtgaagacagcgaccaaggcaggctccctgataacctgtgccactccaagtgggccaacagatacagcacaggcgatggagaatgggctggtgagtctccatgcctacactgtgactggggctgagcagattcaataccgaaggggctgggaagaaattatctccctgtggaacccctggggctggggcgagrccgaatggagagggcgctggagtgatgggtctcaggagtgggaggaaacctgtgatccgcggaaaagccagctacataagaaacgggaagatggcgagttttggatgtcatgtcaagatttccaacagaaattcatcgccatgtttatatgtagcgaaattccaattaccctggaccatggaaacacactccacgaaggatggtcccaaataatgtttaggaagcaagtgattctaggaaacactgcaggaggacctcggaatgatgctcaattcaacttctctgtgcaagagccaatggaaggcaccaatgttgtcgtgtgcgtcacagttgctgtcacaccatcaaatttgaaagcagaagatgcaaaatttccactcgatttccaagtgattctggctggctcacagcggttccgggagaaatttccacccgtgtttttttcctcgttcagaaacactgtccaaagctcaaataataaattccgccgcaacttcaccatgacttaccatctgagccctgggaactatgttgtggttgcacagacacggagaaaatcagcggagttcttgctccgaatcttcctgaaaatgccagacagtgacaggcacctgagcagccatttcaacctcagaatgaagggaagcccttcagaacatggctcccaacaaagcattttcaacagatatgctcagcagaggctggacattgatgccacccagcttcagggccttctcaaccaggagcttctaacaggacctccaggggacatgttctccttagatgagtgccgcagcttggtggctctgatggaactgaaagtgaatgggcggctagaccaagaggagtttgcgcgactgtggaagcgccttgttcactaccagcatgttttccagaaggttcagacaagccctggagtcctcctgagctcggacttgtggaaggccatagagaatacagacttcctcagagggatcttcatcagccgtgagctgctgcatctggtgaccctcaggtacagcgacagcgtcggcagggtcagcttccccagcctggtctgcttcctgatgcggcttgaagccatggcaaagaccttccgcaacctctctaaggatggaaaaggactctacctgacagaaatggagtggatgagcctggtcatgtacaactgaagcaaagaggaaagcagacccatggctcaggacaagctcccagtgatcactcaagaatctggctctcattctaarargctgtgctgcccartatggtggttg

SEQ ID NO: 176 - DNA, 3675 bp, Homo sapiens
  CDS (1)...(3675)
atggggaagaaccgcgagatgcgcctgactcacatctgctgctgctgcctcctttaccagctggggttcctgtcgaatgggatcgtttcagagctgcagttcgcccccgaccgcgaggagtgggaagtcgtgtttcctgcgctctggcgccgggagccggtggacccggctggcggcagcgggggcagcgcggacccgggctgggtgcgcggcgttgggggcggcggaagcgcccgggcgcaggctgccggcagctcacgcgaggtgcgctctgtggctccggtgcctttggaggagcccgtggagggccgatcagagtcccggctccggcccccgccgccgtcggagggtgaggaggacgaggagctcgagtcgcaggagctgccgcggggatccagcggggctgccgccttgtccccgggcgccccggcctcgtggcagccgccgcctcccccgcagccgcccccgtccccgcccccggcccagcatgccgagccggatggcgacgaagtgttgctgcggatcccggccttctctcgggacctgtacctgctgctccggagagacggccgcttcctggcgccgcgcttcgcagtggaacagcggccaaatcccggccccggccccacgggggcagcatccgccccgcaacctcccgcgccaccagacgcaggctgcttctacaccggagctgtgctgcggcaccctggctcgctggcttctttcagcacctgtggaggtggcctgatgggatttatacagctcaatgaggacttcatatttattgagccactcaatgatacaatggccataacaggtcacccacaccgtgtatataggcagaaaaggtccatggaggaaaaggtcacagagaagtcagctcttcacagtcattactgtggtatcatttcagataaaggaagacctaggtctagaaaaatagcagaaagtggaagagggaaacgatattcatacaaattacctcaagaatacaacatagagactgtagtggttgcagacccagcaatggtttcctatcatggagcagatgcagccaggagattcattctaaccatcttaaatatggtatttaaccttttccaacacaagagtctgggtgtgcaggtcaatcttcgtgtgataaagcttattctgctccatgaaactccaccagaactatatattgggcatcatggagaaaaaatgctagagagtttttgtaagtggcaacatgaagaatttggcaaaaagaatgatatacatttagagatgtcaacaaactggggggaagacatgacttcagtggatgcagctatacttataacaaggaaagatttctgtgtgcacaaagatgaaccatgtgatactgttggtatagcttacttgagtggaatgtgtagtgaaaagagaaaatgtattattgctgaagacaatggcttgaatcttgcttttacaattgctcatgaaatgggtcacaacatgggcattaaccatgacaatgaccacccatcgtgtgctgatggtcttcatatcatgtctggtgaatggattaaaggacagaatcttggtgacgtttcatggtctcgatgtagcaaggaagatttggaaagatttctcaggtcaaaggccagtaactgcttgctacaaacaaatccgcagagtgtcaattctgtgatggttccctccaagctgccagggatgacatacactgctgatgaacaatgccagatcctttttgggccattggcttctttttgtcaggagatgcagcatgttatttgcacaggattatggtgcaaggtagaaggtgagaaagaatgcagaaccaagctagacccaccaatggatggaactgactgtgaccttggtaagtggtgtaaggctggagaatgtaccagcaggacctcagcacctgaacatctggccggagagtggagcctgtggagtccttgtagccgaacctgcagtgctgggatcagcagtcgagagcgcaaatgtcctgggctagattctgaagcaagggattgtaatggtcccagaaaacaatacagaatatgtgagaatccaccttgtcctgcaggtttgcctggattcagagactggcaatgtcaggcttatagtgttagaacttcctccccaaagcatatacttcagtggcaagctgtcctggatgaagaaaaaccatgtgccttgttttgctctcctgttggaaaagaacagcctattcttctatcagaaaaagtgatggatggaacttcttgtggctatcagggattagatatctgtgcaaatggcaggtgccagaaagttggctgtgatggtttattagggtctcttgcaagagaagatcattgtggtgtatgcaatggcaatggaaaatcatgcaagatcattaaaggggattttaatcacaccagaggagcaggttatgtagaagtgctggtgatacctgctggagcaagaagaatcaaagttgtggaggaaaagccggcacatagctatttaggtaacctgtgttacagacacagagaagatccaactctccgagatgctggcaaacagtctattaatagtgactggaagattgaacactctggagccttcaatttggctggaactaccgttcattatgtaagacgaggcctctgggagaagatctctgccaaaggtcctactacagcacctttacatcttctggtgctcctgtttcaggatcagaattatggtcttcactatgaatacactatcccatcagaccctcttccagaaaaccagagctctaaagcacctgagcccctcttcatgtggacacacacaagctgggaagattgcgatgccacttgtggaggaggagaaaggaagacaacagtgtcctgcacaaaaatcatgagcaaaaatatcagcattgtggacaatgagaaatgcaaatacttaaccaagccagagccacagattcgaaagtgcaatgagcaaccatgtcaaacaaggtggatgatgacagaatggaccccttgttcacgaacttgtggaaaaggaatgcagagcagacaagtggcctgtacccaacaactgagcaatggaacactgattagagcccgagagagggactgcattgggcccaagcccgcctctgcccagcgctgtgagggccaggactgcatgaccgtgtgggaggcgggagtgtggtctgagtgttcagtcaagtgtggcaaaggcatacgtcatcggaccgttagatgtaccaacccaagaaagaagtgtgtcctctctaccagacccagggaggctgaagactgtgaggattattcaaaatgctatgtgtggcgaatgggtgactggtctaagtgctcaattacctgtggcaaaggaatgcagtcccgtgtaatccaatgcatgcataagatcacaggaagacatggaaatgaatgtttttcctcagaaaaacctgcagcatacaggccatgccatcttcaaccctgcaatgagaaaattaatgtaaataccataacatcacccagactggctgctctgactttcaagtgcctgggagatcagtggccagtgtactgccgagtgatacgtgaaaagaacctatgtcaggacatgcggtggtatcagcgctgctgtgaaacatgcagggacttctatgcccaaaagctgcagcagaagagttga

SEQ ID NO: 177 - protein, 1224 aa, Homo sapiens
MGKNREMRLTHICCCCLLYQLGFLSNGIVSELQFAPDREEWEVVFPALWRREPVDPAGGSGGSADPGWVRGVGGGGSARAQAAGSSREVRSVAPVPLEEPVEGRSESRLRPPPPSEGEEDEELESQELPRGSSGAAALSPGAPASWQPPPPPQPPPSPPPAQHAEPDGDEVLLRIPAFSRDLYLLLRRDGRFLAPRFAVEQRPNPGPGPTGAASAPQPPAPPDAGCFYTGAVLRHPGSLASFSTCGGGLMGFIQLNEDFIFIEPLNDTMAITGHPHRVYRQKRSMEEKVTEKSALHSHYCGIISDKGRPRSRKIAESGRGKRYSYKLPQEYNIETVVVADPAMVSYHGADAARRFILTILNMVFNLFQHKSLGVQVNLRVIKLILLHETPPELYIGHHGEKMLESFCKWQHEEFGKKNDIHLEMSTNWGEDMTSVDAAILITRKDFCVHKDEPCDTVGIAYLSGMCSEKRKCIIAEDNGLNLAFTIAHEMGHNMGINHDNDHPSCADGLHIMSGEWIKGQNLGDVSWSRCSKEDLERFLRSKASNCLLQTNPQSVNSVMVPSKLPGMTYTADEQCQILFGPLASFCQEMQHVICTGLWCKVEGEKECRTKLDPPMDGTDCDLGKWCKAGECTSRTSAPEHLAGEWSLWSPCSRTCSAGISSRERKCPGLDSEARDCNGPRKQYRICENPPCPAGLPGFRDWQCQAYSVRTSSPKHILQWQAVLDEEKPCALFCSPVGKEQPILLSEKVMDGTSCGYQGLDICANGRCQKVGCDGLLGSLAREDHCGVCNGNGKSCKIIKGDFNHTRGAGYVEVLVIPAGARRIKVVEEKPAHSYLGNLCYRHREDPTLRDAGKQSINSDWKIEHSGAFNLAGTTVHYVRRGLWEKISAKGPTTAPLHLLVLLFQDQNYGLHYEYTIPSDPLPENQSSKAPEPLFMWTHTSWEDCDATCGGGERKTTVSCTKIMSKNISIVDNEKCKYLTKPEPQIRKCNEQPCQTRWMMTEWTPCSRTCGKGMQSRQVACTQQLSNGTLIRARERDCIGPKPASAQRCEGQDCMTVWEAGVWSECSVKCGKGIRHRTVRCTNPRKKCVLSTRPREAEDCEDYSKCYVWRMGDWSKCSITCGKGMQSRVIQCMHKITGRHGNECFSSEKPAAYRPCHLQPCNEKINVNTITSPRLAALTFKCLGDQWPVYCRVIREKNLCQDMRWYQRCCETCRDFYAQKLQQKS

SEQ ID NO: 178 - DNA, 2943 bp, Homo sapiens
  CDS (1)...(2943)
atgggatcgtttcagatgggatttatacagctcaatgaggacttcatatttattgagccactcaatgatacaatggccataacaggtcacccacaccgtgtatataggcagaaaaggtccatggaggaaaaggtcacagagaagtcagctcttcacagtcattactgtggtatcatttcagataaaggaagacctaggtctagaaaaatagcagaaagtggaagagggaaacgatattcatacaaattacctcaagaatacaacatagagactgtagtggttgcagacccagcaatggtttcctatcatggagcagatgcagccaggagattcattctaaccatcttaaatatggtatttaaccttttccaacacaagagtctgggtgtgcaggtcaatcttcgtgtgataaagcttattctgctccatgaaactccaccagaactatatattgggcatcatggagaaaaaatgctagagagtttttgtaagtggcaacatgaagaatttggcaaaaagaatgatatacatttagagatgtcaacaaactggggggaagacatgacttcagtggatgcagctatacttataacaaggaaagatttctgtgtgcacaaagatgaaccatgtgatactgttggtatagcttacttgagtggaatgtgtagtgaaaagagaaaatgtattattgctgaagacaatggcttgaatcttgcttttacaattgctcatgaaatgggtcacaacatgggcattaaccatgacaatgaccacccatcgtgtgctgatggtcttcatatcatgtctggtgaatggattaaaggacagaatcttggtgacgtttcatggtctcgatgtagcaaggaagatttggaaagatttctcaggtcaaaggccagtaactgcttgctacaaacaaatccgcagagtgtcaattctgtgatggttccctccaagctgccagggatgacatacactgctgatgaacaatgccagatcctttttgggccattggcttctttttgtcaggagatgcagcatgttatttgcacaggattatggtgcaaggtagaaggtgagaaagaatgcagaaccaagctagacccaccaatggatggaactgactgtgaccttggtaagtggtgtaaggctggagaatgtaccagcaggacctcagcacctgaacatctggccggagagtggagcctgtggagtccttgtagccgaacctgcagtgctgggatcagcagtcgagagcgcaaatgtcctgggctagattctgaagcaagggattgtaatggtcccagaaaacaatacagaatatgtgagaatccaccttgtcctgcaggtttgcctggattcagagactggcaatgtcaggcttatagtgttagaacttcctccccaaagcatatacttcagtggcaagctgtcctggatgaagaaaaaccatgtgccttgttttgctctcctgttggaaaagaacagcctattcttctatcagaaaaagtgatggatggaacttcttgtggctatcagggattagatatctgtgcaaatggcaggtgccagaaagttggctgtgatggtttattagggtctcttgcaagagaagatcattgtggtgtatgcaatggcaatggaaaatcatgcaagatcattaaaggggattttaatcacaccagaggagcaggttatgtagaagtgctggtgatacctgctggagcaagaagaatcaaagttgtggaggaaaagccggcacatagctatttaggtaacctgtgttacagacacagagaagatccaactctccgagatgctggcaaacagtctattaatagtgactggaagattgaacactctggagccttcaatttggctggaactaccgttcattatgtaagacgaggcctctgggagaagatctctgccaaaggtcctactacagcacctttacatcttctggtgctcctgtttcaggatcagaattatggtcttcactatgaatacactatcccatcagaccctcttccagaaaaccagagctctaaagcacctgagcccctcttcatgtggacacacacaagctgggaagattgcgatgccacttgtggaggaggagaaaggaagacaacagtgtcctgcacaaaaatcatgagcaaaaatatcagcattgtggacaatgagaaatgcaaatacttaaccaagccagagccacagattcgaaagtgcaatgagcaaccatgtcaaacaaggtggatgatgacagaatggaccccttgttcacgaacttgtggaaaaggaatgcagagcagacaagtggcctgtacccaacaactgagcaatggaacactgattagagcccgagagagggactgcattgggcccaagcccgcctctgcccagcgctgtgagggccaggactgcatgaccgtgtgggaggcgggagtgtggtctgagtgttcagtcaagtgtggcaaaggcatacgtcatcggaccgttagatgtaccaacccaagaaagaagtgtgtcctctctaccagacccagggaggctgaagactgtgaggattattcaaaatgctatgtgtggcgaatgggtgactggtctaagtgctcaattacctgtggcaaaggaatgcagtcccgtgtaatccaatgcatgcataagatcacaggaagacatggaaatgaatgtttttcctcagaaaaacctgcagcatacaggccatgccatcttcaaccctgcaatgagaaaattaatgtaaataccataacatcacccagactggctgctctgactttcaagtgcctgggagatcagtggccagtgtactgccgagtgatacgtgaaaagaacctatgtcaggacatgcggtggtatcagcgctgctgtgaaacatgcagggacttctatgcccaaaagctgcagcagaagagttga

SEQ ID NO: 179 - protein, 980 aa, Homo sapiens
MGSFQMGFIQLNEDFIFIEPLNDTMAITGHPHRVYRQKRSMEEKVTEKSALHSHYCGIISDKGRPRSRKIAESGRGKRYSYKLPQEYNIETVVVADPAMVSYHGADAARRFILTILNMVFNLFQHKSLGVQVNLRVIKLILLHETPPELYIGHHGEKMLESFCKWQHEEFGKKNDIHLEMSTNWGEDMTSVDAAILITRKDFCVHKDEPCDTVGIAYLSGMCSEKRKCIIAEDNGLNLAFTIAHEMGHNMGINHDNDHPSCADGLHIMSGEWIKGQNLGDVSWSRCSKEDLERFLRSKASNCLLQTNPQSVNSVMVPSKLPGMTYTADEQCQILFGPLASFCQEMQHVICTGLWCKVEGEKECRTKLDPPMDGTDCDLGKWCKAGECTSRTSAPEHLAGEWSLWSPCSRTCSAGISSRERKCPGLDSEARDCNGPRKQYRICENPPCPAGLPGFRDWQCQAYSVRTSSPKHILQWQAVLDEEKPCALFCSPVGKEQPILLSEKVMDGTSCGYQGLDICANGRCQKVGCDGLLGSLAREDHCGVCNGNGKSCKIIKGDFNHTRGAGYVEVLVIPAGARRIKVVEEKPAHSYLGNLCYRHREDPTLRDAGKQSINSDWKIEHSGAFNLAGTTVHYVRRGLWEKISAKGPTTAPLHLLVLLFQDQNYGLHYEYTIPSDPLPENQSSKAPEPLFMWTHTSWEDCDATCGGGERKTTVSCTKIMSKNISIVDNEKCKYLTKPEPQIRKCNEQPCQTRWMMTEWTPCSRTCGKGMQSRQVACTQQLSNGTLIRARERDCIGPKPASAQRCEGQDCMTVWEAGVWSECSVKCGKGIRHRTVRCTNPRKKCVLSTRPREAEDCEDYSKCYVWRMGDWSKCSITCGKGMQSRVIQCMHKITGRHGNECFSSEKPAAYRPCHLQPCNEKINVNTITSPRLAALTFKCLGDQWPVYCRVIREKNLCQDMRWYQRCCETCRDFYAQKLQQKS

SEQ ID NO: 180 - DNA, 1431 bp, Homo sapiens
  CDS (1)...(1431)
atggatggaacttcttgtggctatcagggattagatatctgtgcaaatggcaggtgccagaaagttggctgtgatggtttattagggtctcttgcaagagaagatcattgtggtgtatgcaatggcaatggaaaatcatgcaagatcattaaaggggattttaatcacaccagaggagcaggttatgtagaagtgctggtgatacctgctggagcaagaagaatcaaagttgtggaggaaaagccggcacatagctatttaggtaacctgtgttacagacacagagaagatccaactctccgagatgctggcaaacagtctattaatagtgactggaagattgaacactctggagccttcaatttggctggaactaccgttcattatgtaagacgaggcctctgggagaagatctctgccaaaggtcctactacagcacctttacatcttctggtgctcctgtttcaggatcagaattatggtcttcactatgaatacactatcccatcagaccctcttccagaaaaccagagctctaaagcacctgagcccctcttcatgtggacacacacaagctgggaagattgcgatgccacttgtggaggaggagaaaggaagacaacagtgtcctgcacaaaaatcatgagcaaaaatatcagcattgtggacaatgagaaatgcaaatacttaaccaagccagagccacagattcgaaagtgcaatgagcaaccatgtcaaacaaggtggatgatgacagaatggaccccttgttcacgaacttgtggaaaaggaatgcagagcagacaagtggcctgtacccaacaactgagcaatggaacactgattagagcccgagagagggactgcattgggcccaagcccgcctctgcccagcgctgtgagggccaggactgcatgaccgtgtgggaggcgggagtgtggtctgagtgttcagtcaagtgtggcaaaggcatacgtcatcggaccgttagatgtaccaacccaagaaagaagtgtgtcctctctaccagacccagggaggctgaagactgtgaggattattcaaaatgctatgtgtggcgaatgggtgactggtctaagtgctcaattacctgtggcaaaggaatgcagtcccgtgtaatccaatgcatgcataagatcacaggaagacatggaaatgaatgtttttcctcagaaaaacctgcagcatacaggccatgccatcttcaaccctgcaatgagaaaattaatgtaaataccataacatcacccagactggctgctctgactttcaagtgcctgggagatcagtggccagtgtactgccgagtgatacgtgaaaagaacctatgtcaggacatgcggtggtatcagcgctgctgtgaaacatgcagggacttctatgcccaaaagctgcagcagaagagttga

SEQ ID NO: 181 - protein, 476 aa, Homo sapiens
MDGTSCGYQGLDICANGRCQKVGCDGLLGSLAREDHCGVCNGNGKSCKIIKGDFNHTRGAGYVEVLVIPAGARRIKVVEEKPAHSYLGNLCYRHREDPTLRDAGKQSINSDWKIEHSGAFNLAGTTVHYVRRGLWEKISAKGPTTAPLHLLVLLFQDQNYGLHYEYTIPSDPLPENQSSKAPEPLFMWTHTSWEDCDATCGGGERKTTVSCTKIMSKNISIVDNEKCKYLTKPEPQIRKCNEQPCQTRWMMTEWTPCSRTCGKGMQSRQVACTQQLSNGTLIRARERDCIGPKPASAQRCEGQDCMTVWEAGVWSECSVKCGKGIRHRTVRCTNPRKKCVLSTRPREAEDCEDYSKCYVWRMGDWSKCSITCGKGMQSRVIQCMHKITGRHGNECFSSEKPAAYRPCHLQPCNEKINVNTITSPRLAALTFKCLGDQWPVYCRVIREKNLCQDMRWYQRCCETCRDFYAQKLQQKS

SEQ ID NO: 182 - DNA, 3642 bp, Homo sapiens
  CDS (1)...(3642)
atggggaagaaccgcgagatgcgcctgactcacatctgctgctgctgcctcctttaccagctggggttcctgtcgaatgggatcgtttcagagctgcagttcgcccccgaccgcgaggagtgggaagtcgtgtttcctgcgctctggcgccgggagccggtggacccggctggcggcagcgggggcagcgcggacccgggctgggtgcgcggcgttgggggcggcggaagcgcccgggcgcaggctgccggcagctcacgcgaggtgcgctctgtggctccggtgcctttggaggagcccgtggagggccgatcagagtcccggctccggcccccgccgccgtcggagggtgaggaggacgaggagctcgagtcgcaggagctgccgcggggatccagcggggctgccgccttgtccccgggcgccccggcctcgtggcagccgccgcctcccccgcagccgcccccgtccccgcccccggcccagcatgccgagccggatggcgacgaagtgttgctgcggatcccggccttctctcgggacctgtacctgctgctccggagagacggccgcttcctggcgccgcgcttcgcagtggaacagcggccaaatcccggccccggccccacgggggcagcatccgccccgcaacctcccgcgccaccagacgcaggctgcttctacaccggagctgtgctgcggcaccctggctcgctggcttctttcagcacctgtggaggtggcctgatgggatttatacagctcaatgaggacttcatatttattgagccactcaatgatacaatggccataacaggtcacccacaccgtgtatataggcagaaaaggtccatggaggaaaaggtcacagagaagtcagctcttcacagtcattactgtggtatcatttcagataaaggaagacctaggtctagaaaaatagcagaaagtggaagagggaaacgatattcatacaaattacctcaagaatacaacatagagactgtagtggttgcagacccagcaatggtttcctatcatggagcagatgcagccaggagattcattctaaccatcttaaatatggtatttaaccttttccaacacaagagtctgggtgtgcaggtcaatcttcgtgtgataaagcttattctgctccatgaaactccaccagaactatatattgggcatcatggagaaaaaatgctagagagtttttgtaagtggcaacatgaagaatttggcaaaaagaatgatatacatttagagatgtcaacaaactggggggaagacatgacttcagtggatgcagctatacttataacaaggaaagatttctgtgtgcacaaagatgaaccatgtgatactgttggtatagcttacttgagtggaatgtgtagtgaaaagagaaaatgtattattgctgaagacaatggcttgaatcttgcttttacaattgctcatgaaatgggtcacaacatgggcattaaccatgacaatgaccacccatcgtgtgctgatggtcttcatatcatgtctggtgaatggattaaaggacagaatcttggtgacgtttcatggtctcgatgtagcaaggaagatttggaaagatttctcaggtcaaaggccagtaactgcttgctacaaacaaatccgcagagtgtcaattctgtgatggttccctccaagctgccagggatgacatacactgctgatgaacaatgccagatcctttttgggccattggcttctttttgtcaggagatgcagcatgttatttgcacaggattatggtgcaaggtagaaggtgagaaagaatgcagaaccaagctagacccaccaatggatggaactgactgtgaccttggtaagtggtgtaaggctggagaatgtaccagcaggacctcagcacctgaacatctggccggagagtggagcctgtggagtccttgtagccgaacctgcagtgctgggatcagcagtcgagagcgcaaatgtcctgggctagattctgaagcaagggattgtaatggtcccagaaaacaatacagaatatgtgagaatccaccttgtcctgcaggtttgcctggattcagagactggcaatgtcaggcttatagtgttagaacttcctccccaaagcatatacttcagtggcaagctgtcctggatgaagaaaaaccatgtgccttgttttgctctcctgttggaaaagaacagcctattcttctatcagaaaaagtgatggatggaacttcttgtggctatcagggattagatatctgtgcaaatggcaggtgccagaaagttggctgtgatggtttattagggtctcttgcaagagaagatcattgtggtgtatgcaatggcaatggaaaatcatgcaagatcattaaaggggattttaatcacaccagaggagcaggttatgtagaagtgctggtgatacctgctggagcaagaagaatcaaagttgtggaggaaaagccggcacatagctatttagctctccgagatgctggcaaacagtctattaatagtgactggaagattgaacactctggagccttcaatttggctggaactaccgttcattatgtaagacgaggcctctgggagaagatctctgccaaaggtcctactacagcacctttacatcttctggtgctcctgtttcaggatcagaattatggtcttcactatgaatacactatcccatcagaccctcttccagaaaaccagagctctaaagcacctgagcccctcttcatgtggacacacacaagctgggaagattgcgatgccacttgtggaggaggagaaaggaagacaacagtgtcctgcacaaaaatcatgagcaaaaatatcagcattgtggacaatgagaaatgcaaatacttaaccaagccagagccacagattcgaaagtgcaatgagcaaccatgtcaaacaaggtggatgatgacagaatggaccccttgttcacgaacttgtggaaaaggaatgcagagcagacaagtggcctgtacccaacaactgagcaatggaacactgattagagcccgagagagggactgcattgggcccaagcccgcctctgcccagcgctgtgagggccaggactgcatgaccgtgtgggaggcgggagtgtggtctgagtgttcagtcaagtgtggcaaaggcatacgtcatcggaccgttagatgtaccaacccaagaaagaagtgtgtcctctctaccagacccagggaggctgaagactgtgaggattattcaaaatgctatgtgtggcgaatgggtgactggtctaagtgctcaattacctgtggcaaaggaatgcagtcccgtgtaatccaatgcatgcataagatcacaggaagacatggaaatgaatgtttttcctcagaaaaacctgcagcatacaggccatgccatcttcaaccctgcaatgagaaaattaatgtaaataccataacatcacccagactggctgctctgactttcaagtgcctgggagatcagtggccagtgtactgccgagtgatacgtgaaaagaacctatgtcaggacatgcggtggtatcagcgctgctgtgaaacatgcagggacttctatgcccaaaagctgcagcagaagagttga

SEQ ID NO: 183 - protein, 1213 aa, Homo sapiens [sequence omitted]

SEQ ID NO: 184 - DNA, 2910 bp, Homo sapiens
  CDS (1)...(2910)
atgggatcgtttcagatgggatttatacagctcaatgaggacttcatatttattgagccactcaatgatacaatggccataacaggtcacccacaccgtgtatataggcagaaaaggtccatggaggaaaaggtcacagagaagtcagctcttcacagtcattactgtggtatcatttcagataaaggaagacctaggtctagaaaaatagcagaaagtggaagagggaaacgatattcatacaaattacctcaagaatacaacatagagactgtagtggttgcagacccagcaatggtttcctatcatggagcagatgcagccaggagattcattctaaccatcttaaatatggtatttaaccttttccaacacaagagtctgggtgtgcaggtcaatcttcgtgtgataaagcttattctgctccatgaaactccaccagaactatatattgggcatcatggagaaaaaatgctagagagtttttgtaagtggcaacatgaagaatttggcaaaaagaatgatatacatttagagatgtcaacaaactggggggaagacatgacttcagtggatgcagctatacttataacaaggaaagatttctgtgtgcacaaagatgaaccatgtgatactgttggtatagcttacttgagtggaatgtgtagtgaaaagagaaaatgtattattgctgaagacaatggcttgaatcttgcttttacaattgctcatgaaatgggtcacaacatgggcattaaccatgacaatgaccacccatcgtgtgctgatggtcttcatatcatgtctggtgaatggattaaaggacagaatcttggtgacgtttcatggtctcgatgtagcaaggaagatttggaaagatttctcaggtcaaaggccagtaactgcttgctacaaacaaatccgcagagtgtcaattctgtgatggttccctccaagctgccagggatgacatacactgctgatgaacaatgccagatcctttttgggccattggcttctttttgtcaggagatgcagcatgttatttgcacaggattatggtgcaaggtagaaggtgagaaagaatgcagaaccaagctagacccaccaatggatggaactgactgtgaccttggtaagtggtgtaaggctggagaatgtaccagcaggacctcagcacctgaacatctggccggagagtggagcctgtggagtccttgtagccgaacctgcagtgctgggatcagcagtcgagagcgcaaatgtcctgggctagattctgaagcaagggattgtaatggtcccagaaaacaatacagaatatgtgagaatccaccttgtcctgcaggtttgcctggattcagagactggcaatgtcaggcttatagtgttagaacttcctccccaaagcatatacttcagtggcaagctgtcctggatgaagaaaaaccatgtgccttgttttgctctcctgttggaaaagaacagcctattcttctatcagaaaaagtgatggatggaacttcttgtggctatcagggattagatatctgtgcaaatggcaggtgccagaaagttggctgtgatggtttattagggtctcttgcaagagaagatcattgtggtgtatgcaatggcaatggaaaatcatgcaagatcattaaaggggattttaatcacaccagaggagcaggttatgtagaagtgctggtgatacctgctggagcaagaagaatcaaagttgtggaggaaaagccggcacatagctatttagctctccgagatgctggcaaacagtctattaatagtgactggaagattgaacactctggagccttcaatttggctggaactaccgttcattatgtaagacgaggcctctgggagaagatctctgccaaaggtcctactacagcacctttacatcttctggtgctcctgtttcaggatcagaattatggtcttcactatgaatacactatcccatcagaccctcttccagaaaaccagagctctaaagcacctgagcccctcttcatgtggacacacacaagctgggaagattgcgatgccacttgtggaggaggagaaaggaagacaacagtgtcctgcacaaaaatcatgagcaaaaatatcagcattgtggacaatgagaaatgcaaatacttaaccaagccagagccacagattcgaaagtgcaatgagcaaccatgtcaaacaaggtggatgatgacagaatggaccccttgttcacgaacttgtggaaaaggaatgcagagcagacaagtggcctgtacccaacaactgagcaatggaacactgattagagcccgagagagggactgcattgggcccaagcccgcctctgcccagcgctgtgagggccaggactgcatgaccgtgtgggaggcgggagtgtggtctgagtgttcagtcaagtgtggcaaaggcatacgtcatcggaccgttagatgtaccaacccaagaaagaagtgtgtcctctctaccagacccagggaggctgaagactgtgaggattattcaaaatgctatgtgtggcgaatgggtgactggtctaagtgctcaattacctgtggcaaaggaatgcagtcccgtgtaatccaatgcatgcataagatcacaggaagacatggaaatgaatgtttttcctcagaaaaacctgcagcatacaggccatgccatcttcaaccctgcaatgagaaaattaatgtaaataccataacatcacccagactggctgctctgactttcaagtgcctgggagatcagtggccagtgtactgccgagtgatacgtgaaaagaacctatgtcaggacatgcggtggtatcagcgctgctgtgaaacatgcagggacttctatgcccaaaagctgcagcagaagagttga

SEQ ID NO: 185 - protein, 969 aa, Homo sapiens
MGSFQMGFIQLNEDFIFIEPLNDTMAITGHPHRVYRQKRSMEEKVTEKSALHSHYCGIISDKGRPRSRKIAESGRGKRYSYKLPQEYNIETVVVADPAMVSYHGADAARRFILTILNMVFNLFQHKSLGVQVNLRVIKLILLHETPPELYIGHHGEKMLESFCKWQHEEFGKKNDIHLEMSTNWGEDMTSVDAAILITRKDFCVHKDEPCDTVGIAYLSGMCSEKRKCIIAEDNGLNLAFTIAHEMGHNMGINHDNDHPSCADGLHIMSGEWIKGQNLGDVSWSRCSKEDLERFLRSKASNCLLQTNPQSVNSVMVPSKLPGMTYTADEQCQILFGPLASFCQEMQHVICTGLWCKVEGEKECRTKLDPPMDGTDCDLGKWCKAGECTSRTSAPEHLAGEWSLWSPCSRTCSAGISSRERKCPGLDSEARDCNGPRKQYRICENPPCPAGLPGFRDWQCQAYSVRTSSPKHILQWQAVLDEEKPCALFCSPVGKEQPILLSEKVMDGTSCGYQGLDICANGRCQKVGCDGLLGSLAREDHCGVCNGNGKSCKIIKGDFNHTRGAGYVEVLVIPAGARRIKVVEEKPAHSYLALRDAGKQSINSDWKIEHSGAFNLAGTTVHYVRRGLWEKISAKGPTTAPLHLLVLLFQDQNYGLHYEYTIPSDPLPENQSSKAPEPLFMWTHTSWEDCDATCGGGERKTTVSCTKIMSKNISIVDNEKCKYLTKPEPQIRKCNEQPCQTRWMMTEWTPCSRTCGKGMQSRQVACTQQLSNGTLIRARERDCIGPKPASAQRCEGQDCMTVWEAGVWSECSVKCGKGIRHRTVRCTNPRKKCVLSTRPREAEDCEDYSKCYVWRMGDWSKCSITCGKGMQSRVIQCMHKITGRHGNECFSSEKPAAYRPCHLQPCNEKINVNTITSPRLAALTFKCLGDQWPVYCRVIREKNLCQDMRWYQRCCETCRDFYAQKLQQKS

SEQ ID NO: 186 - DNA, 1398 bp, Homo sapiens
  CDS (1)...(1398)
atggatggaacttcttgtggctatcagggattagatatctgtgcaaatggcaggtgccagaaagttggctgtgatggtttattagggtctcttgcaagagaagatcattgtggtgtatgcaatggcaatggaaaatcatgcaagatcattaaaggggattttaatcacaccagaggagcaggttatgtagaagtgctggtgatacctgctggagcaagaagaatcaaagttgtggaggaaaagccggcacatagctatttagctctccgagatgctggcaaacagtctattaatagtgactggaagattgaacactctggagccttcaatttggctggaactaccgttcattatgtaagacgaggcctctgggagaagatctctgccaaaggtcctactacagcacctttacatcttctggtgctcctgtttcaggatcagaattatggtcttcactatgaatacactatcccatcagaccctcttccagaaaaccagagctctaaagcacctgagcccctcttcatgtggacacacacaagctgggaagattgcgatgccacttgtggaggaggagaaaggaagacaacagtgtcctgcacaaaaatcatgagcaaaaatatcagcattgtggacaatgagaaatgcaaatacttaaccaagccagagccacagattcgaaagtgcaatgagcaaccatgtcaaacaaggtggatgatgacagaatggaccccttgttcacgaacttgtggaaaaggaatgcagagcagacaagtggcctgtacccaacaactgagcaatggaacactgattagagcccgagagagggactgcattgggcccaagcccgcctctgcccagcgctgtgagggccaggactgcatgaccgtgtgggaggcgggagtgtggtctgagtgttcagtcaagtgtggcaaaggcatacgtcatcggaccgttagatgtaccaacccaagaaagaagtgtgtcctctctaccagacccagggaggctgaagactgtgaggattattcaaaatgctatgtgtggcgaatgggtgactggtctaagtgctcaattacctgtggcaaaggaatgcagtcccgtgtaatccaatgcatgcataagatcacaggaagacatggaaatgaatgtttttcctcagaaaaacctgcagcatacaggccatgccatcttcaaccctgcaatgagaaaattaatgtaaataccataacatcacccagactggctgctctgactttcaagtgcctgggagatcagtggccagtgtactgccgagtgatacgtgaaaagaacctatgtcaggacatgcggtggtatcagcgctgctgtgaaacatgcagggacttctatgcccaaaagctgcagcagaagagttga

SEQ ID NO: 187 - protein, 465 aa, Homo sapiens
MDGTSCGYQGLDICANGRCQKVGCDGLLGSLAREDHCGVCNGNGKSCKIIKGDFNHTRGAGYVEVLVIPAGARRIKVVEEKPAHSYLALRDAGKQSINSDWKIEHSGAFNLAGTTVHYVRRGLWEKISAKGPTTAPLHLLVLLFQDQNYGLHYEYTIPSDPLPENQSSKAPEPLFMWTHTSWEDCDATCGGGERKTTVSCTKIMSKNISIVDNEKCKYLTKPEPQIRKCNEQPCQTRWMMTEWTPCSRTCGKGMQSRQVACTQQLSNGTLIRARERDCIGPKPASAQRCEGQDCMTVWEAGVWSECSVKCGKGIRHRTVRCTNPRKKCVLSTRPREAEDCEDYSKCYVWRMGDWSKCSITCGKGMQSRVIQCMHKITGRHGNECFSSEKPAAYRPCHLQPCNEKINVNTITSPRLAALTFKCLGDQWPVYCRVIREKNLCQDMRWYQRCCETCRDFYAQKLQQKS

SEQ ID NO: 188 - DNA, 4666 bp, Homo sapiens
ggacaccacagctctcctgcccgcgccgggcagtcctctgcctgtccagaggcagcactcccggctctcggctggctgtgggtctgtcttgtggggctccagcactagcctgctcggcctcggaaactcctgcagcgtccagaacacagaaaatagactcatctcctaattcgccagggagctcgagggctgcggggccgcggggctgcctcccccgctcctcccccaacccgaccccaccccacccccgccagggcttcggcggcctcccggagtcacacagcctacccccccaccccaacaccccctcccccggcagacaaagggcctgggcaaattcgccgcccggcctcctagcgctccggggaggccgctgcgccccggagtggatcgcgctggaggcgtgcgccgggcgagaagccgcggccgcgggagcgcagtatggggaagaaccgcgagatgcgcctgactcacatctgctgctgctgcctcctttaccagctggggttcctgtcgaatgggatcgtttcagagctgcagttcgcccccgaccgcgaggagtgggaagtcgtgtttcctgcgctctggcgccgggagccggtggacccggctggcggcagcgggggcagcgcggacccgggctgggtgcgcggcgttgggggcggcggaagcgcccgggcgcaggctgccggcagctcacgcgaggtgcgctctgtggctccggtgcctttggaggagcccgtggagggccgatcagagtcccggctccggcccccgccgccgtcggagggtgaggaggacgaggagctcgagtcgcaggagctgccgcggggatccagcggggctgccgccttgtccccgggcgccccggcctcgtggcagccgccgcctcccccgcagccgcccccgtccccgcccccggcccagcatgccgagccggatggcgacgaagtgttgctgcggatcccggccttctctcgggacctgtacctgctgctccggagagacggccgcttcctggcgccgcgcttcgcagtggaacagcggccaaatcccggccccggccccacgggggcagcatccgccccgcaacctcccgcgccaccagacgcaggctgcttctacaccggagctgtgctgcggcaccctggctcgctggcttctttcagcacctgtggaggtggcctgatgggatttatacagctcaatgaggacttcatatttattgagccactcaatgatacaatggccataacaggtcacccacaccgtgtatataggcagaaaaggtccatggaggaaaaggtcacagagaagtcagctcttcacagtcattactgtggtatcatttcagataaaggaagacctaggtctagaaaaatagcagaaagtggaagagggaaacgatattcatacaaattacctcaagaatacaacatagagactgtagtggttgcagacccagcaatggtttcctatcatggagcagatgcagccaggagattcattctaaccatcttaaatatggtatttaaccttttccaacacaagagtctgggtgtgcaggtcaatcttcgtgtgataaagcttattctgctccatgaaactccaccagaactatatattgggcatcatggagaaaaaatgctagagagtttttgtaagtggcaacatgaagaatttggcaaaaagaatgatatacatttagagatgtcaacaaactggggggaagacatgacttcagtggatgcagctatacttataacaaggaaagatttctgtgtgcacaaagatgaaccatgtgatactgttggtatagcttacttgagtggaatgtgtagtgaaaagagaaaatgtattattgctgaagacaatggcttgaatcttgcttttacaattgctcatgaaatgggtcacaacatgggcattaaccatgacaatgaccacccatcgtgtgctgatggtcttcatatcatgtctggtgaatggattaaaggacagaatcttggtgacgtttcatggtctcgatgtagcaaggaagatttggaaagatttctcaggtcaaaggccagtaactgcttgctacaaacaaatccgcagagtgtcaattctgtgatggttccctccaagctgccagggatgacatacactgctgatgaacaatgccagatcctttttgggccattggcttctttttgtcaggagatgcagcatgttatttgcacaggattatggtgcaaggtagaaggtgagaaagaatgcagaaccaagctagacccaccaatggatggaactgactgtgaccttggtaagtggtgtaaggctggagaatgtaccagcaggacctcagcacctgaacatctggccggagagtggagcctgtggagtccttgtagccgaacctgcagtgctgggatcagcagtcgagagcgcaaatgtcctgggctagattctgaagcaagggattgtaatggtcccagaaaacaatacagaatatgtgagaatccaccttgtcctgcaggtttgcctggattcagagactggcaatgtcaggcttatagtgttagaacttcctccccaaagcatatacttcagtggcaagctgtcctggatgaagaaaaaccatgtgccttgttttgctctcctgttggaaaagaacagcctattcttctatcagaaaaagtgatggatggaacttcttgtggctatcagggattagatatctgtgcaaatggcaggtgccagaaagttggctgtgatggtttattagggtctcttgcaagagaagatcattgtggtgtatgcaatggcaatggaaaatcatgcaagatcattaaaggggattttaatcacaccagaggagcaggttatgtagaagtgctggtgatacctgctggagcaagaagaatcaaagttgtggaggaaaagccggcacatagctatttaggtaacctgtgttacagacacagagaagatccaactctccgagatgctggcaaacagtctattaatagtgactggaagattgaacactctggagccttcaatttggctggaactaccgttcattatgtaagacgaggcctctgggagaagatctctgccaaaggtcctactacagcacctttacatcttctggtgctcctgtttcaggatcagaattatggtcttcactatgaatacactatcccatcagaccctcttccagaaaaccagagctctaaagcacctgagcccctcttcatgtggacacacacaagctgggaagattgcgatgccacttgtggaggaggagaaaggaagacaacagtgtcctgcacaaaaatcatgagcaaaaatatcagcattgtggacaatgagaaatgcaaatacttaaccaagccagagccacagattcgaaagtgcaatgagcaaccatgtcaaacaaggtggatgatgacagaatggaccccttgttcacgaacttgtggaaaaggaatgcagagcagacaagtggcctgtacccaacaactgagcaatggaacactgattagagcccgagagagggactgcattgggcccaagcccgcctctgcccagcgctgtgagggccaggactgcatgaccgtgtgggaggcgggagtgtggtctgagtgttcagtcaagtgtggcaaaggcatacgtcatcggaccgttagatgtaccaacccaagaaagaagtgtgtcctctctaccagacccagggaggctgaagactgtgaggattattcaaaatgctatgtgtggcgaatgggtgactggtctaagtgctcaattacctgtggcaaaggaatgcagtcccgtgtaatccaatgcatgcataagatcacaggaagacatggaaatgaatgtttttcctcagaaaaacctgcagcatacaggccatgccatcttcaaccctgcaatgagaaaattaatgtaaataccataacatcacccagactggctgctctgactttcaagtgcctgggagatcagtggccagtgtactgccgagtgatacgtgaaaagaacctatgtcaggacatgcggtggtatcagcgctgctgtgaaacatgcagggacttctatgcccaaaagctgcagcagaagagttgacctctagcaggctggctggatcacagctctttgcaattacattatttataaacacacacactagcatgtttttcagaccaaatattatcagattacatataatttaatcaaattaatttatttttttgcctgccaaacatccaatgtggtgcttgttttggttacacaaacattttgatttatactatatggcttcataaataattttatatgaatgaattagttggatccagtaatataataaaaagaaaaaggaaaaaaatagatcattatacttaaaacaaggtttcgttgtttgttagggctatctctaaggtgctactctctccccaccaataacattgaattatccagaatgtatactgacttagcataatagtttaggtgtatatgaagagaaactatttttgttttttggtgtcctgctgcagaattagcccattttctgtcacctgcaggagatgtgtaaacataatgaacctcatgctgttgaacaggtttttaagagaatgtattatgaaattggttcagatttatagacatccatagg

SEQ ID NO: 189 - DNA, 2781 bp, Homo sapiens
  CDS (1)...(2781)
atgccagggggcgcaggcgccgcccggctctgcttgctggcgtttgccctgcagcccctccggccgcgggcggcgcgggagcctggatggacaagaggaagtgaggaaggcagccccaagctgcagcatgaacttatcatacctcagtggaagacttcagaaagccccgtgagagaaaagcatccactcaaagctgagctcagggtaatggctgaggggcgagaactgatcctggacctggagaagaatgagcaactttttgctccttcctacacagaaacccattatacttcaagtggtaaccctcaaaccaccacacggaaattggaggatcactgcttttaccacggcacggtgagggagacagaactgtccagcgtcacgctcagcacttgccgaggaattagaggactgattacggtgagcagcaacctcagctacgtcatcgagcccctccctgacagcaagggccaacaccttatttacagatctgaacatctcaagccgcccccgggaaactgtgggttcgagcactccaagcccaccaccagggactgggctcttcagtttacacaacagaccaagaagcgacctcgcaggatgaaaagggaagatttaaactccatgaagtatgtggagctttacctcgtggctgattatttagagtttcagaagaatcgacgagaccaggacgccaccaaacacaagctcatagagatcgccaactatgttgataagttttaccgatccttgaacatccggattgctctcgtgggcttggaagtgtggacccacgggaacatgtgtgaagtttcagagaatccatattctaccctctggtcctttctcagttggaggcgcaagctgcttgcccagaagtaccatgacaacgcccaattaatcacgggcatgtccttccacggcaccaccatcggcctggcccccctcatggccatgtgctctgtgtaccagtctggaggagtcaacatggaccactccgagaatgccattggcgtggctgccaccatggcccacgagatgggccacaactttggcatgacccatgattctgcagattgctgctcggccagtgcggctgatggtgggtgcatcatggcagctgccactgggcacccctttcccaaagtgttcaatggatgcaacaggagggagctggacaggtatctgcagtcaggtggtggaatgtgtctctccaacatgccagacaccaggatgttgtatggaggccggaggtgtgggaacgggtatctggaagatggggaagagtgtgactgtggagaagaagaggaatgtaacaacccctgctgcaatgcctctaattgtaccctgaggccgggggcggagtgtgctcacggctcctgctgccaccagtgtaagctgttggctcctgggaccctgtgccgcgagcaggccaggcagtgtgacctcccggagttctgtacgggcaagtctccccactgccctaccaacttctaccagatggatggtaccccctgtgagggcggccaggcctactgctacaacggcatgtgcctcacctaccaggagcagtgccagcagctgtggggacccggagcccgacctgcccctgacctctgcttcgagaaggtgaatgtggcaggagacacctttggaaactgtggaaaggacatgaatggtgaacacaggaagtgcaacatgagagatgcgaagtgtgggaagatccagtgtcagagctctgaggcccggcccctggagtccaacgcggtgcccattgacaccactatcatcatgaatgggaggcagatccagtgccggggcacccacgtctaccgaggtcctgaggaggagggtgacatgctggacccagggctggtgatgactggaaccaagtgtggctacaaccatatttgctttgaggggcagtgcaggaacacctccttctttgaaactgaaggctgtgggaagaagtgcaatggccatggggtctgtaacaacaaccagaactgccactgcctgccgggctgggccccgcccttctgcaacacaccgggccacgggggcagtatcgacagtgggcctatgccccctgagagtgtgggtcctgtggtagctggagtgttggtggccatcttggtgctggcggtcctcatgctgatgtactactgctgcagacagaacaacaaactaggccaactcaagccctcagctctcccttccaagctgaggcaacagttcagttgtcccttcagggtttctcagaacagcgggactggtcatgccaacccaactttcaagctgcagacgccccagggcaagcgaaaggtgttccttgacttgtgcgtacaggtgatcaacactccggaaatcctgcggaagccctcccagcctcctccccggccccctccagattatctgcgtggtgggtccccacctgcaccactgccagctcacctgagcagggctgctaggaactccccagggcccgggtctcaaatagagaggacggagtcgtccaggaggcctcctccaagccggccaattccccccgcaccaaattgcatcgtttcccaggacttctccaggcctcggccgccccagaaggcactcccggcaaacccagtgccaggccgcaggagcctccccaggccaggaggtgcatccccactgcggccccctggtgctggccctcagcagtcccggcctctggcagcacttgccccaaagagggtatggaagacttgcaatttgaaaactggggaccagttccaaagtcagtaa

SEQ ID NO: 190 - protein, 926 aa, Homo sapiens
MPGGAGAARLCLLAFALQPLRPRAAREPGWTRGSEEGSPKLQHELIIPQWKTSESPVREKHPLKAELRVMAEGRELILDLEKNEQLFAPSYTETHYTSSGNPQTTTRKLEDHCFYHGTVRETELSSVTLSTCRGIRGLITVSSNLSYVIEPLPDSKGQHLIYRSEHLKPPPGNCGFEHSKPTTRDWALQFTQQTKKRPRRMKREDLNSMKYVELYLVADYLEFQKNRRDQDATKHKLIEIANYVDKFYRSLNIRIALVGLEVWTHGNMCEVSENPYSTLWSFLSWRRKLLAQKYHDNAQLITGMSFHGTTIGLAPLMAMCSVYQSGGVNMDHSENAIGVAATMAHEMGHNFGMTHDSADCCSASAADGGCIMAAATGHPFPKVFNGCNRRELDRYLQSGGGMCLSNMPDTRMLYGGRRCGNGYLEDGEECDCGEEEECNNPCCNASNCTLRPGAECAHGSCCHQCKLLAPGTLCREQARQCDLPEFCTGKSPHCPTNFYQMDGTPCEGGQAYCYNGMCLTYQEQCQQLWGPGARPAPDLCFEKVNVAGDTFGNCGKDMNGEHRKCNMRDAKCGKIQCQSSEARPLESNAVPIDTTIIMNGRQIQCRGTHVYRGPEEEGDMLDPGLVMTGTKCGYNHICFEGQCRNTSFFETEGCGKKCNGHGVCNNNQNCHCLPGWAPPFCNTPGHGGSIDSGPMPPESVGPVVAGVLVAILVLAVLMLMYYCCRQNNKLGQLKPSALPSKLRQQFSCPFRVSQNSGTGHANPTFKLQTPQGKRKVFLDLCVQVINTPEILRKPSQPPPRPPPDYLRGGSPPAPLPAHLSRAARNSPGPGSQIERTESSRRPPPSRPIPPAPNCIVSQDFSRPRPPQKALPANPVPGRRSLPRPGGASPLRPPGAGPQQSRPLAALAPKRVWKTCNLKTGDQFQSQ

SEQ ID NO: 191 - DNA, 2757 bp, Homo sapiens
  CDS (1)...(2757)
atgccagggggcgcaggcgccgcccggctctgcttgctggcgtttgccctgcagcccctccggccgcgggcggcgcgggagcctggatggacaagaggaagtgaggaaggcagccccaagctgcagcatgaacttatcatacctcagtggaagacttcagaaagccccgtgagagaaaagcatccactcaaagctgagctcagggtaatggctgaggggcgagaactgatcctggacctggagaagaatgagcaactttttgctccttcctacacagaaacccattatacttcaagtggtaaccctcaaaccaccacacggaaattggaggatcactgcttttaccacggcacggtgagggagacagaactgtccagcgtcacgctcagcacttgccgaggaattagaggactgattacggtgagcagcaacctcagctacgtcatcgagcccctccctgacagcaagggccaacaccttatttacagatctgaacatctcaagccgcccccgggaaactgtgggttcgagcactccaagcccaccaccagggactgggctcttcagtttacacaacagaccaagaagcgacctcgcaggatgaaaagggaagatttaaactccatgaagtatgtggagctttacctcgtggctgattatttagagtttcagaagaatcgacgagaccaggacgccaccaaacacaagctcatagagatcgccaactatgttgataagttttaccgatccttgaacatccggattgctctcgtgggcttggaagtgtggacccacgggaacatgtgtgaagtttcagagaatccatattctaccctctggtcctttctcagttggaggcgcaagctgcttgcccagaagtaccatgacaacgcccaattaatcacgggcatgtccttccacggcaccaccatcggcctggcccccctcatggccatgtgctctgtgtaccagtctggaggagtcaacatggaccactccgagaatgccattggcgtggctgccaccatggcccacgagatgggccacaactttggcatgacccatgattctgcagattgctgctcggccagtgcggctgatggtgggtgcatcatggcagctgccactgggcacccctttcccaaagtgttcaatggatgcaacaggagggagctggacaggtatctgcagtcaggtggtggaatgtgtctctccaacatgccagacaccaggatgttgtatggaggccggaggtgtgggaacgggtatctggaagatggggaagagtgtgactgtggagaagaagaggaatgtaacaacccctgctgcaatgcctctaattgtaccctgaggccgggggcggagtgtgctcacggctcctgctgccaccagtgtaagctgttggctcctgggaccctgtgccgcgagcaggccaggcagtgtgacctcccggagttctgtacgggcaagtctccccactgccctaccaacttctaccagatggatggtaccccctgtgagggcggccaggcctactgctacaacggcatgtgcctcacctaccaggagcagtgccagcagctgtggggacccggagcccgacctgcccctgacctctgcttcgagaaggtgaatgtggcaggagacacctttggaaactgtggaaaggacatgaatggtgaacacaggaagtgcaacatgagagatgcgaagtgtgggaagatccagtgtcagagctctgaggcccggcccctggagtccaacgcggtgcccattgacaccactatcatcatgaatgggaggcagatccagtgccggggcacccacgtctaccgaggtcctgaggaggagggtgacatgctggacccagggctggtgatgactggaaccaagtgtggctacaaccatatttgctttgaggggcagtgcaggaacacctccttctttgaaactgaaggctgtgggaagaagtgcaatggccatggggtctgtaacaacaaccagaactgccactgcctgccgggctgggccccgcccttctgcaacacaccgggccacgggggcagtatcgacagtgggcctatgccccctgagagtgtgggtcctgtggtagctggagtgttggtggccatcttggtgctggcggtcctcatgctgatgtactactgctgcagacagaacaacaaactaggccaactcaagccctcagctctcccttccaagctgaggcaacagttcagttgtcccttcagggtttctcagaacagcgggactggtcatgccaacccaactttcaagctgcagacgccccagggcaagcgaaaggtgatcaacactccggaaatcctgcggaagccctcccagcctcctccccggccccctccagattatctgcgtggtgggtccccacctgcaccactgccagctcacctgagcagggctgctaggaactccccagggcccgggtctcaaatagagaggacggagtcgtccaggaggcctcctccaagccggccaattccccccgcaccaaattgcatcgtttcccaggacttctccaggcctcggccgccccagaaggcactcccggcaaacccagtgccaggccgcaggagcctccccaggccaggaggtgcatccccactgcggccccctggtgctggccctcagcagtcccggcctctggcagcacttgccccaaagagggtatggaagacttgcaatttgaaaactggggaccagttccaaagtcagtaa

SEQ ID NO: 192 - protein, 918 aa, Homo sapiens
MPGGAGAARLCLLAFALQPLRPRAAREPGWTRGSEEGSPKLQHELIIPQWKTSESPVREKHPLKAELRVMAEGRELILDLEKNEQLFAPSYTETHYTSSGNPQTTTRKLEDHCFYHGTVRETELSSVTLSTCRGIRGLITVSSNLSYVIEPLPDSKGQHLIYRSEHLKPPPGNCGFEHSKPTTRDWALQFTQQTKKRPRRMKREDLNSMKYVELYLVADYLEFQKNRRDQDATKHKLIEIANYVDKFYRSLNIRIALVGLEVWTHGNMCEVSENPYSTLWSFLSWRRKLLAQKYHDNAQLITGMSFHGTTIGLAPLMAMCSVYQSGGVNMDHSENAIGVAATMAHEMGHNFGMTHDSADCCSASAADGGCIMAAATGHPFPKVFNGCNRRELDRYLQSGGGMCLSNMPDTRMLYGGRRCGNGYLEDGEECDCGEEEECNNPCCNASNCTLRPGAECAHGSCCHQCKLLAPGTLCREQARQCDLPEFCTGKSPHCPTNFYQMDGTPCEGGQAYCYNGMCLTYQEQCQQLWGPGARPAPDLCFEKVNVAGDTFGNCGKDMNGEHRKCNMRDAKCGKIQCQSSEARPLESNAVPIDTTIIMNGRQIQCRGTHVYRGPEEEGDMLDPGLVMTGTKCGYNHICFEGQCRNTSFFETEGCGKKCNGHGVCNNNQNCHCLPGWAPPFCNTPGHGGSIDSGPMPPESVGPVVAGVLVAILVLAVLMLMYYCCRQNNKLGQLKPSALPSKLRQQFSCPFRVSQNSGTGHANPTFKLQTPQGKRKVINTPEILRKPSQPPPRPPPDYLRGGSPPAPLPAHLSRAARNSPGPGSQIERTESSRRPPPSRPIPPAPNCIVSQDFSRPRPPQKALPANPVPGRRSLPRPGGASPLRPPGAGPQQSRPLAALAPKRVWKTCNLKTGDQFQSQ

SEQ ID NO: 193 - DNA, 2892 bp, Homo sapiens
  CDS (1)...(2892)
atgccagggggcgcaggcgccgcccggctctgcttgctggcgtttgccctgcagcccctccggccgcgggcggcgcgggagcctggatggacaagaggaagtgaggaaggcagccccaagctgcagcatgaacttatcatacctcagtggaagacttcagaaagccccgtgagagaaaagcatccactcaaagctgagctcagggtaatggctgaggggcgagaactgatcctggacctggagaagaatgagcaactttttgctccttcctacacagaaacccattatacttcaagtggtaaccctcaaaccaccacacggaaattggaggatcactgcttttaccacggcacggtgagggagacagaactgtccagcgtcacgctcagcacttgccgaggaattagaggactgattacggtgagcagcaacctcagctacgtcatcgagcccctccctgacagcaagggccaacaccttatttacagatctgaacatctcaagccgcccccgggaaactgtgggttcgagcactccaagcccaccaccagggactgggctcttcagtttacacaacagaccaagaagcgacctcgcaggatgaaaagggaagatttaaactccatgaagtatgtggagctttacctcgtggctgattatttagagtttcagaagaatcgacgagaccaggacgccaccaaacacaagctcatagagatcgccaactatgttgataagttttaccgatccttgaacatccggattgctctcgtgggcttggaagtgtggacccacgggaacatgtgtgaagtttcagagaatccatattctaccctctggtcctttctcagttggaggcgcaagctgcttgcccagaagtaccatgacaacgcccaattaatcacgggcatgtccttccacggcaccaccatcggcctggcccccctcatggccatgtgctctgtgtaccagtctggaggagtcaacatggaccactccgagaatgccattggcgtggctgccaccatggcccacgagatgggccacaactttggcatgacccatgattctgcagattgctgctcggccagtgcggctgatggtgggtgcatcatggcagctgccactgggcacccctttcccaaagtgttcaatggatgcaacaggagggagctggacaggtatctgcagtcaggtggtggaatgtgtctctccaacatgccagacaccaggatgttgtatggaggccggaggtgtgggaacgggtatctggaagatggggaagagtgtgactgtggagaagaagaggaatgtaacaacccctgctgcaatgcctctaattgtaccctgaggccgggggcggagtgtgctcacggctcctgctgccaccagtgtaagctgttggctcctgggaccctgtgccgcgagcaggccaggcagtgtgacctcccggagttctgtacgggcaagtctccccactgccctaccaacttctaccagatggatggtaccccctgtgagggcggccaggcctactgctacaacggcatgtgcctcacctaccaggagcagtgccagcagctgtggggacccggagcccgacctgcccctgacctctgcttcgagaaggtgaatgtggcaggagacacctttggaaactgtggaaaggacatgaatggtgaacacaggaagtgcaacatgagagatgcgaagtgtgggaagatccagtgtcagagctctgaggcccggcccctggagtccaacgcggtgcccattgacaccactatcatcatgaatgggaggcagatccagtgccggggcacccacgtctaccgaggtcctgaggaggagggtgacatgctggacccagggctggtgatgactggaaccaagtgtggctacaaccatatttgctttgaggggcagtgcaggaacacctccttctttgaaactgaaggctgtgggaagaagtgcaatggccatggggtctgtaacaacaaccagaactgccactgcctgccgggctgggccccgcccttctgcaacacaccgggccacgggggcagtatcgacagtgggcctatgccccctgagagtgtgggtcctgtggtagctggagtgttggtggccatcttggtgctggcggtcctcatgctgatgtactactgctgcagacagaacaacaaactaggccaactcaagccctcagctctcccttccaagctgaggcaacagttcagttgtcccttcagggtttctcagaacagcgggactggtcatgccaacccaactttcaagctgcagacgccccagggcaagcgaaaggtgttccttgacttgtgcgtacaggtgatcaacactccggaaatcctgcggaagccctcccagcctcctccccggccccctccagattatctgcgtggtgggtccccacctgcaccactgccagctcacctgagcagggctgctaggaactccccagggcccgggtctcaaatagagaggacggagtcgtccaggaggcctcctccaagccggccaattccccccgcaccaaattgcatcgtttcccaggacttctccaggcctcggccgccccagaaggcactcccggcaaacccagtgccaggccgcaggagcctccccaggccaggaggtgcatccccactgcggccccctggtgctggccctcagcagtcccggcctctggcagcacttgccccaaaggtgagtccacgggaagccctcaaggtgaaagctggtaccagagggctccaggggggcaggtgtagagttgagaaaacaaagcaattcatgcttcttgtggtctggactgaacttccagaacaaaagccaagggcaaaacattcatgtttcttggtgcccgcttga

SEQ ID NO: 194 - protein, 963 aa, Homo sapiens
MPGGAGAARLCLLAFALQPLRPRAAREPGWTRGSEEGSPKLQHELIIPQWKTSESPVREKHPLKAELRVMAEGRELILDLEKNEQLFAPSYTETHYTSSGNPQTTTRKLEDHCFYHGTVRETELSSVTLSTCRGIRGLITVSSNLSYVIEPLPDSKGQHLIYRSEHLKPPPGNCGFEHSKPTTRDWALQFTQQTKKRPRRMKREDLNSMKYVELYLVADYLEFQKNRRDQDATKHKLIEIANYVDKFYRSLNIRIALVGLEVWTHGNMCEVSENPYSTLWSFLSWRRKLLAQKYHDNAQLITGMSFHGTTIGLAPLMAMCSVYQSGGVNMDHSENAIGVAATMAHEMGHNFGMTHDSADCCSASAADGGCIMAAATGHPFPKVFNGCNRRELDRYLQSGGGMCLSNMPDTRMLYGGRRCGNGYLEDGEECDCGEEEECNNPCCNASNCTLRPGAECAHGSCCHQCKLLAPGTLCREQARQCDLPEFCTGKSPHCPTNFYQMDGTPCEGGQAYCYNGMCLTYQEQCQQLWGPGARPAPDLCFEKVNVAGDTFGNCGKDMNGEHRKCNMRDAKCGKIQCQSSEARPLESNAVPIDTTIIMNGRQIQCRGTHVYRGPEEEGDMLDPGLVMTGTKCGYNHICFEGQCRNTSFFETEGCGKKCNGHGVCNNNQNCHCLPGWAPPFCNTPGHGGSIDSGPMPPESVGPVVAGVLVAILVLAVLMLMYYCCRQNNKLGQLKPSALPSKLRQQFSCPFRVSQNSGTGHANPTFKLQTPQGKRKVFLDLCVQVINTPEILRKPSQPPPRPPPDYLRGGSPPAPLPAHLSRAARNSPGPGSQIERTESSRRPPPSRPIPPAPNCIVSQDFSRPRPPQKALPANPVPGRRSLPRPGGASPLRPPGAGPQQSRPLAALAPKVSPREALKVKAGTRGLQGGRCRVEKTKQFMLLVVWTELPEQKPRAKHSCFLVPA

SEQ ID NO: 195 - DNA, 2868 bp, Homo sapiens
  CDS (1)...(2868)
atgccagggggcgcaggcgccgcccggctctgcttgctggcgtttgccctgcagcccctccggccgcgggcggcgcgggagcctggatggacaagaggaagtgaggaaggcagccccaagctgcagcatgaacttatcatacctcagtggaagacttcagaaagccccgtgagagaaaagcatccactcaaagctgagctcagggtaatggctgaggggcgagaactgatcctggacctggagaagaatgagcaactttttgctccttcctacacagaaacccattatacttcaagtggtaaccctcaaaccaccacacggaaattggaggatcactgcttttaccacggcacggtgagggagacagaactgtccagcgtcacgctcagcacttgccgaggaattagaggactgattacggtgagcagcaacctcagctacgtcatcgagcccctccctgacagcaagggccaacaccttatttacagatctgaacatctcaagccgcccccgggaaactgtgggttcgagcactccaagcccaccaccagggactgggctcttcagtttacacaacagaccaagaagcgacctcgcaggatgaaaagggaagatttaaactccatgaagtatgtggagctttacctcgtggctgattatttagagtttcagaagaatcgacgagaccaggacgccaccaaacacaagctcatagagatcgccaactatgttgataagttttaccgatccttgaacatccggattgctctcgtgggcttggaagtgtggacccacgggaacatgtgtgaagtttcagagaatccatattctaccctctggtcctttctcagttggaggcgcaagctgcttgcccagaagtaccatgacaacgcccaattaatcacgggcatgtccttccacggcaccaccatcggcctggcccccctcatggccatgtgctctgtgtaccagtctggaggagtcaacatggaccactccgagaatgccattggcgtggctgccaccatggcccacgagatgggccacaactttggcatgacccatgattctgcagattgctgctcggccagtgcggctgatggtgggtgcatcatggcagctgccactgggcacccctttcccaaagtgttcaatggatgcaacaggagggagctggacaggtatctgcagtcaggtggtggaatgtgtctctccaacatgccagacaccaggatgttgtatggaggccggaggtgtgggaacgggtatctggaagatggggaagagtgtgactgtggagaagaagaggaatgtaacaacccctgctgcaatgcctctaattgtaccctgaggccgggggcggagtgtgctcacggctcctgctgccaccagtgtaagctgttggctcctgggaccctgtgccgcgagcaggccaggcagtgtgacctcccggagttctgtacgggcaagtctccccactgccctaccaacttctaccagatggatggtaccccctgtgagggcggccaggcctactgctacaacggcatgtgcctcacctaccaggagcagtgccagcagctgtggggacccggagcccgacctgcccctgacctctgcttcgagaaggtgaatgtggcaggagacacctttggaaactgtggaaaggacatgaatggtgaacacaggaagtgcaacatgagagatgcgaagtgtgggaagatccagtgtcagagctctgaggcccggcccctggagtccaacgcggtgcccattgacaccactatcatcatgaatgggaggcagatccagtgccggggcacccacgtctaccgaggtcctgaggaggagggtgacatgctggacccagggctggtgatgactggaaccaagtgtggctacaaccatatttgctttgaggggcagtgcaggaacacctccttctttgaaactgaaggctgtgggaagaagtgcaatggccatggggtctgtaacaacaaccagaactgccactgcctgccgggctgggccccgcccttctgcaacacaccgggccacgggggcagtatcgacagtgggcctatgccccctgagagtgtgggtcctgtggtagctggagtgttggtggccatcttggtgctggcggtcctcatgctgatgtactactgctgcagacagaacaacaaactaggccaactcaagccctcagctctcccttccaagctgaggcaacagttcagttgtcccttcagggtttctcagaacagcgggactggtcatgccaacccaactttcaagctgcagacgccccagggcaagcgaaaggtgatcaacactccggaaatcctgcggaagccctcccagcctcctccccggccccctccagattatctgcgtggtgggtccccacctgcaccactgccagctcacctgagcagggctgctaggaactccccagggcccgggtctcaaatagagaggacggagtcgtccaggaggcctcctccaagccggccaattccccccgcaccaaattgcatcgtttcccaggacttctccaggcctcggccgccccagaaggcactcccggcaaacccagtgccaggccgcaggagcctccccaggccaggaggtgcatccccactgcggccccctggtgctggccctcagcagtcccggcctctggcagcacttgccccaaaggtgagtccacgggaagccctcaaggtgaaagctggtaccagagggctccaggggggcaggtgtagagttgagaaaacaaagcaattcatgcttcttgtggtctggactgaacttccagaacaaaagccaagggcaaaacattcatgtttcttggtgcccgcttga

SEQ ID NO: 196 - protein, 955 aa, Homo sapiens
MPGGAGAARLCLLAFALQPLRPRAAREPGWTRGSEEGSPKLQHELIIPQWKTSESPVREKHPLKAELRVMAEGRELILDLEKNEQLFAPSYTETHYTSSGNPQTTTRKLEDHCFYHGTVRETELSSVTLSTCRGIRGLITVSSNLSYVIEPLPDSKGQHLIYRSEHLKPPPGNCGFEHSKPTTRDWALQFTQQTKKRPRRMKREDLNSMKYVELYLVADYLEFQKNRRDQDATKHKLIEIANYVDKFYRSLNIRIALVGLEVWTHGNMCEVSENPYSTLWSFLSWRRKLLAQKYHDNAQLITGMSFHGTTIGLAPLMAMCSVYQSGGVNMDHSENAIGVAATMAHEMGHNFGMTHDSADCCSASAADGGCIMAAATGHPFPKVFNGCNRRELDRYLQSGGGMCLSNMPDTRMLYGGRRCGNGYLEDGEECDCGEEEECNNPCCNASNCTLRPGAECAHGSCCHQCKLLAPGTLCREQARQCDLPEFCTGKSPHCPTNFYQMDGTPCEGGQAYCYNGMCLTYQEQCQQLWGPGARPAPDLCFEKVNVAGDTFGNCGKDMNGEHRKCNMRDAKCGKIQCQSSEARPLESNAVPIDTTIIMNGRQIQCRGTHVYRGPEEEGDMLDPGLVMTGTKCGYNHICFEGQCRNTSFFETEGCGKKCNGHGVCNNNQNCHCLPGWAPPFCNTPGHGGSIDSGPMPPESVGPVVAGVLVAILVLAVLMLMYYCCRQNNKLGQLKPSALPSKLRQQFSCPFRVSQNSGTGHANPTFKLQTPQGKRKVINTPEILRKPSQPPPRPPPDYLRGGSPPAPLPAHLSRAARNSPGPGSQIERTESSRRPPPSRPIPPAPNCIVSQDFSRPRPPQKALPANPVPGRRSLPRPGGASPLRPPGAGPQQSRPLAALAPKVSPREALKVKAGTRGLQGGRCRVEKTKQFMLLVVWTELPEQKPRAKHSCFLVPA

SEQ ID NO: 197 - DNA, 3512 bp, Homo sapiens
cacccgtccgttctccatctttcccgccttcctcaaccctcgggtgaccttccttcttcatcctgcggagccccggggctgagcggagcgtctcgacagaggctggagcgggtggggaggcgcggggcgagccggggggttccagacgcgcctccaccgccgggcagtgggcaggtatggctgagggcgtgtgagcgccgagcgctaagggccgccgccaccatgccagggggcgcaggcgccgcccggctctgcttgctggcgtttgccctgcagcccctccggccgcgggcggcgcgggagcctggatggacaagaggaagtgaggaaggcagccccaagctgcagcatgaacttatcatacctcagtggaagacttcagaaagccccgtgagagaaaagcatccactcaaagctgagctcagggtaatggctgaggggcgagaactgatcctggacctggagaagaatgagcaactttttgctccttcctacacagaaacccattatacttcaagtggtaaccctcaaaccaccacacggaaattggaggatcactgcttttaccacggcacggtgagggagacagaactgtccagcgtcacgctcagcacttgccgaggaattagaggactgattacggtgagcagcaacctcagctacgtcatcgagcccctccctgacagcaagggccaacaccttatttacagatctgaacatctcaagccgcccccgggaaactgtgggttcgagcactccaagcccaccaccagggactgggctcttcagtttacacaacagaccaagaagcgacctcgcaggatgaaaagggaagatttaaactccatgaagtatgtggagctttacctcgtggctgattatttagagtttcagaagaatcgacgagaccaggacgccaccaaacacaagctcatagagatcgccaactatgttgataagttttaccgatccttgaacatccggattgctctcgtgggcttggaagtgtggacccacgggaacatgtgtgaagtttcagagaatccatattctaccctctggtcctttctcagttggaggcgcaagctgcttgcccagaagtaccatgacaacgcccaattaatcacgggcatgtccttccacggcaccaccatcggcctggcccccctcatggccatgtgctctgtgtaccagtctggaggagtcaacatggaccactccgagaatgccattggcgtggctgccaccatggcccacgagatgggccacaactttggcatgacccatgattctgcagattgctgctcggccagtgcggctgatggtgggtgcatcatggcagctgccactgggcacccctttcccaaagtgttcaatggatgcaacaggagggagctggacaggtatctgcagtcaggtggtggaatgtgtctctccaacatgccagacaccaggatgttgtatggaggccggaggtgtgggaacgggtatctggaagatggggaagagtgtgactgtggagaagaagaggaatgtaacaacccctgctgcaatgcctctaattgtaccctgaggccgggggcggagtgtgctcacggctcctgctgccaccagtgtaagctgttggctcctgggaccctgtgccgcgagcaggccaggcagtgtgacctcccggagttctgtacgggcaagtctccccactgccctaccaacttctaccagatggatggtaccccctgtgagggcggccaggcctactgctacaacggcatgtgcctcacctaccaggagcagtgccagcagctgtggggacccggagcccgacctgcccctgacctctgcttcgagaaggtgaatgtggcaggagacacctttggaaactgtggaaaggacatgaatggtgaacacaggaagtgcaacatgagagatgcgaagtgtgggaagatccagtgtcagagctctgaggcccggcccctggagtccaacgcggtgcccattgacaccactatcatcatgaatgggaggcagatccagtgccggggcacccacgtctaccgaggtcctgaggaggagggtgacatgctggacccagggctggtgatgactggaaccaagtgtggctacaaccatatttgctttgaggggcagtgcaggaacacctccttctttgaaactgaaggctgtgggaagaagtgcaatggccatggggtctgtaacaacaaccagaactgccactgcctgccgggctgggccccgcccttctgcaacacaccgggccacgggggcagtatcgacagtgggcctatgccccctgagagtgtgggtcctgtggtagctggagtgttggtggccatcttggtgctggcggtcctcatgctgatgtactactgctgcagacagaacaacaaactaggccaactcaagccctcagctctcccttccaagctgaggcaacagttcagttgtcccttcagggtttctcagaacagcgggactggtcatgccaacccaactttcaagctgcagacgccccagggcaagcgaaaggtgttccttgacttgtgcgtacaggtgatcaacactccggaaatcctgcggaagccctcccagcctcctccccggccccctccagattatctgcgtggtgggtccccacctgcaccactgccagctcacctgagcagggctgctaggaactccccagggcccgggtctcaaatagagaggacggagtcgtccaggaggcctcctccaagccggccaattccccccgcaccaaattgcatcgtttcccaggacttctccaggcctcggccgccccagaaggcactcccggcaaacccagtgccaggccgcaggagcctccccaggccaggaggtgcatccccactgcggccccctggtgctggccctcagcagtcccggcctctggcagcacttgccccaaaggtgagtccacgggaagccctcaaggtgaaagctggtaccagagggctccaggggggcaggtgtagagttgagaaaacaaagcaattcatgcttcttgtggtctggactgaacttccagaacaaaagccaagggcaaaacattcatgtttcttggtgcccgcttgactgtggagttttggcttcatgtgaaaggtgattcttagaatcctgagctgtggtggcttcagtcctgcccctgcacctgacctggggagggaccctgagcaagtccctcttgagtctgtttcctcatttgtacagaggctatgatgagcagtagtaccagccccatcaggttgttgtgaagagcaaggaagtgcattagtagaaccacctggcctgcgggaggctgtgtacacttggcccctyctcgtacttcttctgtgtggctgacagtctcagtttgccagtcttggcartcaggtcagaaagggatgaggtgaagaagctggctkrmcatgctgtattcccacgaggcattgagaaaactatggactgtgctgctgccttarcagggaagggaa

SEQ ID NO: 198 - DNA, 1509 bp, Homo sapiens
  CDS (1)...(1509)
atggctcagcggtgcgtttgcgtgctggccctggtggctatgctgctcctagttttccctaccgtctccagatcgatgggcccgaggagcggggagcatcaaagggcgtcgcgaatcccttctcagttcagcaaagaggaacgcgtcgcgatgaaagaggcgctgaaaggtgccatccagattccaacagtgacttttagctctgagaagtccaatactacagccctggctgagttcggaaaatacattcataaagtctttcctacagtggtcagcaccagctttatccagcatgaagtcgtggaagagtatagccacctgttcactatccaaggctcggaccccagcttgcagccctacctgctgatggctcactttgatgtggtgcctgcccctgaagaaggctgggaggtgcccccattctctgggttggagcgtgatggcgtcatctatggtcggggcacactggacgacaagaactctgtgatggcattactgcaggccttggagctcctgctgatcaggaagtacatcccccgaagatctttcttcatttctctgggccatgatgaggagtcatcagggacaggggctcagaggatctcagccctgctacagtcaaggggcgtccagctagccttcattgtggacgaggggggcttcatcttggatgatttcattcctaacttcaagaagcccatcgccttgattgcagtctcagagaagggttccatgaacctcatgctgcaagtaaacatgacttcaggccactcttcagctcctccaaaggagacaagcattggcatccttgcagctgctgtcagccgattggagcagacaccaatgcctatcatatttggaagcgggacagtggtgactgtattgcagcaactggcaaatgagtttcccttccctgtcaatataatcctgagcaacccatggctatttgaaccacttataagcaggtttatggagagaaatcccttaaccaatgcaataatcaggaccaccacggcactcaccatattcaaagcaggggtcaagttcaatgtcatccccccagtggcccaggccacagtcaacttccggattcaccctggacagacagtccaagaggtcctagaactcacgaagaacattgtggctgataacagagtccagttccatgtgttgagtgcctttgaccccctccccgtcagcccttctgatgacaaggccttgggctaccagctgctccgccagaccgtacagtccgtcttcccggaagtcaatattactgccccagttacttctattggcaacacagacagccgattctttacaaacctcaccactggcatctacaggttctaccccatctacatacagcctgaagacttcaaacgcatccatggagtcaacgagaaaatctcagtccaagcctatgagacccaagtgaaattcatctttgagttgattcagaatgctgacacagaccaggagccagtttctcacctgcacaaactgtga

SEQ ID NO: 199 - protein, 502 aa, Homo sapiens
MAQRCVCVLALVAMLLLVFPTVSRSMGPRSGEHQRASRIPSQFSKEERVAMKEALKGAIQIPTVTFSSEKSNTTALAEFGKYIHKVFPTVVSTSFIQHEVVEEYSHLFTIQGSDPSLQPYLLMAHFDVVPAPEEGWEVPPFSGLERDGVIYGRGTLDDKNSVMALLQALELLLIRKYIPRRSFFISLGHDEESSGTGAQRISALLQSRGVQLAFIVDEGGFILDDFIPNFKKPIALIAVSEKGSMNLMLQVNMTSGHSSAPPKETSIGILAAAVSRLEQTPMPIIFGSGTVVTVLQQLANEFPFPVNIILSNPWLFEPLISRFMERNPLTNAIIRTTTALTIFKAGVKFNVIPPVAQATVNFRIHPGQTVQEVLELTKNIVADNRVQFHVLSAFDPLPVSPSDDKALGYQLLRQTVQSVFPEVNITAPVTSIGNTDSRFFTNLTTGIYRFYPIYIQPEDFKRIHGVNEKISVQAYETQVKFIFELIQNADTDQEPVSHLHKL

SEQ ID NO: 200 - DNA, 1086 bp, Homo sapiens
  CDS (1)...(1086)
atggctcagcggtgcgtttgcgtgctggccctggtggctatgctgctcctagttttccctaccgtctccagatcgatgggcccgaggagcggggagcatcaaagggcgtcgcgaatcccttctcagttcagcaaagaggaacgcgtcgcgatgaaagaggcgctgaaaggtgccatccagattccaacagtgacttttagctctgagaagtccaatactacagccctggctgagttcggaaaatacattcataaagtctttcctacagtggtcagcaccagctttatccagcatgaagtcgtggaagagtatagccacctgttcactatccaaggctcggaccccagcttgcagccctacctgctgatggctcactttgatgtggtgcctgcccctgaagaaggctgggaggtgcccccattctctgggttggagcgtgatggcgtcatctatggtcggggcacactggacgacaagaactctgtgatggcattactgcaggccttggagctcctgctgatcaggaagtacatcccccgaagatctttcttcatttctctgggccatgatgaggagtcatcagggacaggggctcagaggatctcagccctgctacagtcaaggggcgtccagctagccttcattgtggacgaggggggcttcatcttggatgatttcattcctaacttcaagaagcccatcgccttgattgcagtctcagagaagggttccatgaacctcatgctgcaagtaaacatgacttcaggccactcttcagctcctccaaaggagacaagcattggcatccttgcagctgctgtcagccgattggagcagacaccaatgcctatcatatttggaagcgggacagtggtgactgtattgcagcaactggcaaatgaggtttatggagagaaatcccttaaccaatgcaataatcaggaccaccacggcactcaccatattcaaagcaggggtcaagttcaatgtcatccccccagtggcccaggccacagtcaacttccggattcaccctggacagacagtccaagaggtcctagaactcacgaagaacattgtggctga

SEQ ID NO: 201 - protein, 361 aa, Homo sapiens
MAQRCVCVLALVAMLLLVFPTVSRSMGPRSGEHQRASRIPSQFSKEERVAMKEALKGAIQIPTVTFSSEKSNTTALAEFGKYIHKVFPTVVSTSFIQHEVVEEYSHLFTIQGSDPSLQPYLLMAHFDVVPAPEEGWEVPPFSGLERDGVIYGRGTLDDKNSVMALLQALELLLIRKYIPRRSFFISLGHDEESSGTGAQRISALLQSRGVQLAFIVDEGGFILDDFIPNFKKPIALIAVSEKGSMNLMLQVNMTSGHSSAPPKETSIGILAAAVSRLEQTPMPIIFGSGTVVTVLQQLANEVYGEKSLNQCNNQDHHGTHHIQSRGQVQCHPPSGPGHSQLPDSPWTDSPRGPRTHEEHCG

SEQ ID NO: 202 - DNA, 4398 bp, Homo sapiens
  CDS (1)...(4398)
atggtgcgctgcattcagaagctgaaccgaactgtggttgcaaatgaaatatgcgaacactttgcccttcagcctcctacagaacaggcttgcctcattccttgtccccgggattgtgtagtatctgagttcttaccatggtccaactgtagcaagggatgtgggaagaaattgcagcatagaactcgcgcggtcatagctccccctctctttggtggtttgcaatgtccaaatctgactgagtcaagagcctgtgatgctcccatttcctgtcctcttggggaagaggaatatacatttagccttaaggttggaccatggagtaaatgcagactgcctcatcttaaagaaattaatccaagcggaagaactgttctggattttaactctgattcaaatgagcgagtcacctttaaacatcaaagttacaaagcacatcatcattcgaagtcttgggcaatagagataggttatcaaacccggcaggtttcgtgtacaagaagtgatggacaaaatgctatgttaagcctttgccttcaagattccttcccattgactgttcagtcctgcatcatgcccaaagactgtgaaacctcccagtggtcctcctggagcccctgctccaagacatgccgttcagggagtctcttgccaggatttaggagcaggagccggaacgtgaagcacatggctattggaggtggaaaggagtgtcctgaacttcttgagaaagaggcctgcattgttgaaggagaacttctgcagcaatgtcccaggtattcctggagaacttctgaatggaaagaatgccaagtctctctcctcctcgagcagcaggatccccactggcatgtgacgggacccgtgtgtggcggtgggatccagacccgggaggtgtactgtgcccagagcgtaccagcagctgccgcactgagggccaaggaagtctctagacctgtggaaaaggcattatgtgtgggacccgccccgttgccctctcagctctgcaatatcccttgctctacggactgcatagtatcttcctggtcagcctggggcctgtgcatccatgaaaactgtcatgaacctcaggggaaaaaaggatttagaacgaggcagcgccatgtcctcatggaatctacagggcctgcagggcattgccctcatttggtggagtctgttccttgtgaggatccaatgtgctaccgatggctggcatcagaagggatctgtttccctgatcatggaaaatgtggcctgggacatcgtattctgaaggccgtctgccagaatgaccgcggagaagatgtatcagggagtctttgcccagttccccctcctcctgagaggaagtcttgtgaaattccctgccgaatggactgtgtgctgagcgagtggacggagtggtcatcctgttcccagtcctgttcaaataaaaactcagatgggaaacagaccaggtcaagaactatcctggcactggctggggaaggtggaaagccatgtccccctagtcaggctctccaagagcatcgtttgtgtaatgaccattcctgtatgcagcttcactgggagacatcgccttggggcccttgttctgaggacacattggtaactgcccttaatgcaaccattggctggaatggagaagccacgtgtggtgtaggcattcagactcggagagtcttctgtgtcaagagtcacgtgggacaagtaatgaccaaaagatgtccagattctactcgacctgaaactgtgcgcccctgttttctcccatgcaaaaaagactgtattgtgactgctttcagtgagtggacaccctgcccaaggatgtgccaagcaggaaatgccacagtaaaacagtctcgatacagaatcatcatccaagaagcagccaatggaggccaggaatgcccagataccttatatgaggagagagagtgtgaagatgtttccttgtgtcctgtatatcggtggaagccacagaaatggagcccttgcatcttagtgccagagtctgtctggcagggaataacgggcagcagtgaagcctgtggaaaggggttacaaacaagagctgtctcatgcatctctgatgacaaccggtcagcagaaatgatggaatgcctcaagcagacaaacggcatgcctctccttgtgcaagaatgcacagtcccatgtcgagaagactgcaccttcactgcttggtccaagtttacgccctgctccacgaactgtgaagccacaaaaagtaggcggcgacagctcacagggaaaagcagaaagaaggagaaatgccaggattctgacctttaccctctagtggagacagaactatgtccttgtgatgaatttatatcccaaccttatggaaactggtcagattgcattcttccagaaggcagaagggagcctcaccgaggactgcgggtacaagcagacagcaaagaatgtggagaaggcctgcgctttcgagcagtagcctgttctgataaaaatggaagacctgttgacccctccttctgcagcagctctggttacattcaagaaaaatgtgtcattccctgcccatttgattgcaagttaagcgattggtctagttgggggtcttgcagttcatcttgtggaattggagtgagaattcgatccaaatggctaaaagaaaaaccttacaatggaggacgaccatgtcccaaactggatctcaagaatcaggtacatgaggcagtcccatgttacagtgagtgcaatcagtattcctgggttgtagaacactggtcttcatgcaaaatcaacaatgagctgaggtccctgcgctgtggaggaggaacacaatctaggaaaatcagatgtgtgaatactgcggatggtgaaggtggagcagtggatagcaacctgtgcaaccaggatgaaattcccccagaaacccagtcctgttctcttatgtgtcccaatgagtgtgtcatgtctgagtggggactttggagcaaatgcccacagtcatgcgatccccacacaatgcagagaagaactcgccacctgctaagaccatcactgaactcaaggacttgtgctgaagactcacaggtgcagccttgcctcctgaatgaaaattgcttccagttccagtacaatctaacagagtggagcacatgccagctgagtgaaaacgcaccctgtggtcaaggcgtcaggacccgcctgctaagctgtgtgtgcagtgatggcaagccagtcagcatggaccaatgtgagcagcataatttggagaagccccagagaatgagcattccctgcttggtggaatgcgtggtcaactgtcagctctcagggtggacggcttggacagagtgttcacagacctgtggccatggaggtcgaatgagccggactcgatttatcattatgccaacccaaggagaaggacggccatgccccacagagcttacccaggagaaaacctgcccagtgaccccctgctacagctgggtccttggcaactggtctgcatgtaaattggagggtggagactgtggggaaggagttcagatccgcagcctttcctgcatggtccacagtggttcaatatctcatgcagctggacgtgtcgaggatgcactgtgtggagaaatgccctttcaggacagcatcctgaagcagctgtgttctgtgccttgcccaggagactgccatttaacagaatggtcagagtggagcacatgtgaattaacctgcattgatggaagaagctttgagactgtgggccgccagtctagatcaaggacttttataattcagtcttttgagaaccaagacagctgcccccaacaggttctagaaacacgcccttgtacaggaggcaaatgttatcactacacatggaaagcaagtctttggaacaataacgaacgaactgtatggtgccagcgttcagatggcgttaatgtcacaggaggctgctcccctcaggcccgtcctgctgccattcggcagtgcattccagcctgcagaaaacctttctcctactgtacacagggtggagtctgtggttgtgagaagggctatacagagataatgaaatcaaatggtttcctggattactgcatgaaagtaccaggctcagaggataaaaaagctgatgtgaaaaacctttctgggaaaaacagacctgtgaattcaaaaatacatgatatttttaaaggatggtctcttcaaccacttgatccagatggccgagtaaaaatttgggtttatggcgtttcaggtggcgcttttctcatcatgattttcctaatatttacttcctaccttgtttgcaagaagccaaaaccacatcaaagcacacctccccaacagaagcctctgaccttagcctacgatggagacttagacatgtaa

SEQ ID NO: 203 - protein, 1465 aa, Homo sapiens
MVRCIQKLNRTVVANEICEHFALQPPTEQACLIPCPRDCVVSEFLPWSNCSKGCGKKLQHRTRAVIAPPLFGGLQCPNLTESRACDAPISCPLGEEEYTFSLKVGPWSKCRLPHLKEINPSGRTVLDFNSDSNERVTFKHQSYKAHHHSKSWAIEIGYQTRQVSCTRSDGQNAMLSLCLQDSFPLTVQSCIMPKDCETSQWSSWSPCSKTCRSGSLLPGFRSRSRNVKHMAIGGGKECPELLEKEACIVEGELLQQCPRYSWRTSEWKECQVSLLLEQQDPHWHVTGPVCGGGIQTREVYCAQSVPAAAALRAKEVSRPVEKALCVGPAPLPSQLCNIPCSTDCIVSSWSAWGLCIHENCHEPQGKKGFRTRQRHVLMESTGPAGHCPHLVESVPCEDPMCYRWLASEGICFPDHGKCGLGHRILKAVCQNDRGEDVSGSLCPVPPPPERKSCEIPCRMDCVLSEWTEWSSCSQSCSNKNSDGKQTRSRTILALAGEGGKPCPPSQALQEHRLCNDHSCMQLHWETSPWGPCSEDTLVTALNATIGWNGEATCGVGIQTRRVFCVKSHVGQVMTKRCPDSTRPETVRPCFLPCKKDCIVTAFSEWTPCPRMCQAGNATVKQSRYRIIIQEAANGGQECPDTLYEERECEDVSLCPVYRWKPQKWSPCILVPESVWQGITGSSEACGKGLQTRAVSCISDDNRSAEMMECLKQTNGMPLLVQECTVPCREDCTFTAWSKFTPCSTNCEATKSRRRQLTGKSRKKEKCQDSDLYPLVETELCPCDEFISQPYGNWSDCILPEGRREPHRGLRVQADSKECGEGLRFRAVACSDKNGRPVDPSFCSSSGYIQEKCVIPCPFDCKLSDWSSWGSCSSSCGIGVRIRSKWLKEKPYNGGRPCPKLDLKNQVHEAVPCYSECNQYSWVVEHWSSCKINNELRSLRCGGGTQSRKIRCVNTADGEGGAVDSNLCNQDEIPPETQSCSLMCPNECVMSEWGLWSKCPQSCDPHTMQRRTRHLLRPSLNSRTCAEDSQVQPCLLNENCFQFQYNLTEWSTCQLSENAPCGQGVRTRLLSCVCSDGKPVSMDQCEQHNLEKPQRMSIPCLVECVVNCQLSGWTAWTECSQTCGHGGRMSRTRFIIMPTQGEGRPCPTELTQEKTCPVTPCYSWVLGNWSACKLEGGDCGEGVQIRSLSCMVHSGSISHAAGRVEDALCGEMPFQDSILKQLCSVPCPGDCHLTEWSEWSTCELTCIDGRSFETVGRQSRSRTFIIQSFENQDSCPQQVLETRPCTGGKCYHYTWKASLWNNNERTVWCQRSDGVNVTGGCSPQARPAAIRQCIPACRKPFSYCTQGGVCGCEKGYTEIMKSNGFLDYCMKVPGSEDKKADVKNLSGKNRPVNSKIHDIFKGWSLQPLDPDGRVKIWVYGVSGGAFLIMIFLIFTSYLVCKKPKPHQSTPPQQKPLTLAYDGDLDM

SEQ ID NO: 204 - DNA, 4773 bp, Homo sapiens
  CDS (1)...(4773)
atgaggaagctctttctattgctttctctcttgctgtcccatgcagctcatttggaaggcaaaaaggataatcagttcatctggaaaccaggtccgtggggaaggtgtacaggagactgtggtcccggaggagtccagagtcgggcagtgtggtgttttcatgttgacgggtggacaagtcacctgtctaactgtggtgagagcaacaggcctccaaaggaaagaagttgtttccgagtttgtgactggcacagtgacctctttcagtgggaggtttctgactggcaccactgtgtgcttgttccttacgctcgcggtgaagtcaagcctcggactgcagagtgtgtgacggctcagcatggactgcagcaccggatggtgcgctgcattcagaagctgaaccgaactgtggttgcaaatgaaatatgcgaacactttgcccttcagcctcctacagaacaggcttgcctcattccttgtccccgggattgtgtagtatctgagttcttaccatggtccaactgtagcaagggatgtgggaagaaattgcagcatagaactcgcgcggtcatagctccccctctctttggtggtttgcaatgtccaaatctgactgagtcaagagcctgtgatgctcccatttcctgtcctcttggggaagaggaatatacatttagccttaaggttggaccatggagtaaatgcagactgcctcatcttaaagaaattaatccaagcggaagaactgttctggattttaactctgattcaaatgagcgagtcacctttaaacatcaaagttacaaagcacatcatcattcgaagtcttgggcaatagagataggttatcaaacccggcaggtttcgtgtacaagaagtgatggacaaaatgctatgttaagcctttgccttcaagattccttcccattgactgttcagtcctgcatcatgcccaaagactgtgaaacctcccagtggtcctcctggagcccctgctccaagacatgccgttcagggagtctcttgccaggatttaggagcaggagccggaacgtgaagcacatggctattggaggtggaaaggagtgtcctgaacttcttgagaaagaggcctgcattgttgaaggagaacttctgcagcaatgtcccaggtattcctggagaacttctgaatggaaagaatgccaagtctctctcctcctcgagcagcaggatccccactggcatgtgacgggacccgtgtgtggcggtgggatccagacccgggaggtgtactgtgcccagagcgtaccagcagctgccgcactgagggccaaggaagtctctagacctgtggaaaaggcattatgtgtgggacccgccccgttgccctctcagctctgcaatatcccttgctctacggactgcatagtatcttcctggtcagcctggggcctgtgcatccatgaaaactgtcatgaacctcaggggaaaaaaggatttagaacgaggcagcgccatgtcctcatggaatctacagggcctgcagggcattgccctcatttggtggagtctgttccttgtgaggatccaatgtgctaccgatggctggcatcagaagggatctgtttccctgatcatggaaaatgtggcctgggacatcgtattctgaaggccgtctgccagaatgaccgcggagaagatgtatcagggagtctttgcccagttccccctcctcctgagaggaagtcttgtgaaattccctgccgaatggactgtgtgctgagcgagtggacggagtggtcatcctgttcccagtcctgttcaaataaaaactcagatgggaaacagaccaggtcaagaactatcctggcactggctggggaaggtggaaagccatgtccccctagtcaggctctccaagagcatcgtttgtgtaatgaccattcctgtatgcagcttcactgggagacatcgccttggggcccttgttctgaggacacattggtaactgcccttaatgcaaccattggctggaatggagaagccacgtgtggtgtaggcattcagactcggagagtcttctgtgtcaagagtcacgtgggacaagtaatgaccaaaagatgtccagattctactcgacctgaaactgtgcgcccctgttttctcccatgcaaaaaagactgtattgtgactgctttcagtgagtggacaccctgcccaaggatgtgccaagcaggaaatgccacagtaaaacagtctcgatacagaatcatcatccaagaagcagccaatggaggccaggaatgcccagataccttatatgaggagagagagtgtgaagatgtttccttgtgtcctgtatatcggtggaagccacagaaatggagcccttgcatcttagtgccagagtctgtctggcagggaataacgggcagcagtgaagcctgtggaaaggggttacaaacaagagctgtctcatgcatctctgatgacaaccggtcagcagaaatgatggaatgcctcaagcagacaaacggcatgcctctccttgtgcaagaatgcacagtcccatgtcgagaagactgcaccttcactgcttggtccaagtttacgccctgctccacgaactgtgaagccacaaaaagtaggcggcgacagctcacagggaaaagcagaaagaaggagaaatgccaggattctgacctttaccctctagtggagacagaactatgtccttgtgatgaatttatatcccaaccttatggaaactggtcagattgcattcttccagaaggcagaagggagcctcaccgaggactgcgggtacaagcagacagcaaagaatgtggagaaggcctgcgctttcgagcagtagcctgttctgataaaaatggaagacctgttgacccctccttctgcagcagctctggttacattcaagaaaaatgtgtcattccctgcccatttgattgcaagttaagcgattggtctagttgggggtcttgcagttcatcttgtggaattggagtgagaattcgatccaaatggctaaaagaaaaaccttacaatggaggacgaccatgtcccaaactggatctcaagaatcaggtacatgaggcagtcccatgttacagtgagtgcaatcagtattcctgggttgtagaacactggtcttcatgcaaaatcaacaatgagctgaggtccctgcgctgtggaggaggaacacaatctaggaaaatcagatgtgtgaatactgcggatggtgaaggtggagcagtggatagcaacctgtgcaaccaggatgaaattcccccagaaacccagtcctgttctcttatgtgtcccaatgagtgtgtcatgtctgagtggggactttggagcaaatgcccacagtcatgcgatccccacacaatgcagagaagaactcgccacctgctaagaccatcactgaactcaaggacttgtgctgaagactcacaggtgcagccttgcctcctgaatgaaaattgcttccagttccagtacaatctaacagagtggagcacatgccagctgagtgaaaacgcaccctgtggtcaaggcgtcaggacccgcctgctaagctgtgtgtgcagtgatggcaagccagtcagcatggaccaatgtgagcagcataatttggagaagccccagagaatgagcattccctgcttggtggaatgcgtggtcaactgtcagctctcagggtggacggcttggacagagtgttcacagacctgtggccatggaggtcgaatgagccggactcgatttatcattatgccaacccaaggagaaggacggccatgccccacagagcttacccaggagaaaacctgcccagtgaccccctgctacagctgggtccttggcaactggtctgcatgtaaattggagggtggagactgtggggaaggagttcagatccgcagcctttcctgcatggtccacagtggttcaatatctcatgcagctggacgtgtcgaggatgcactgtgtggagaaatgccctttcaggacagcatcctgaagcagctgtgttctgtgccttgcccaggagactgccatttaacagaatggtcagagtggagcacatgtgaattaacctgcattgatggaagaagctttgagactgtgggccgccagtctagatcaaggacttttataattcagtcttttgagaaccaagacagctgcccccaacaggttctagaaacacgcccttgtacaggaggcaaatgttatcactacacatggaaagcaagtctttggaacaataacgaacgaactgtatggtgccagcgttcagatggcgttaatgtcacaggaggctgctcccctcaggcccgtcctgctgccattcggcagtgcattccagcctgcagaaaacctttctcctactgtacacagggtggagtctgtggttgtgagaagggctatacagagataatgaaatcaaatggtttcctggattactgcatgaaagtaccaggctcagaggataaaaaagctgatgtgaaaaacctttctgggaaaaacagacctgtgaattcaaaaatacatgatatttttaaaggatggtctcttcaaccacttgatccagatggccgagtaaaaatttgggtttatggcgtttcaggtggcgcttttctcatcatgattttcctaatatttacttcctaccttgtttgcaagaagccaaaaccacatcaaagcacacctccccaacagaagcctctgaccttagcctacgatggagacttagacatgtaa

SEQ ID NO: 205 - protein, 1590 aa, Homo sapiens
MRKLFLLLSLLLSHAAHLEGKKDNQFIWKPGPWGRCTGDCGPGGVQSRAVWCFHVDGWTSHLSNCGESNRPPKERSCFRVCDWHSDLFQWEVSDWHHCVLVPYARGEVKPRTAECVTAQHGLQHRMVRCIQKLNRTVVANEICEHFALQPPTEQACLIPCPRDCVVSEFLPWSNCSKGCGKKLQHRTRAVIAPPLFGGLQCPNLTESRACDAPISCPLGEEEYTFSLKVGPWSKCRLPHLKEINPSGRTVLDFNSDSNERVTFKHQSYKAHHHSKSWAIEIGYQTRQVSCTRSDGQNAMLSLCLQDSFPLTVQSCIMPKDCETSQWSSWSPCSKTCRSGSLLPGFRSRSRNVKHMAIGGGKECPELLEKEACIVEGELLQQCPRYSWRTSEWKECQVSLLLEQQDPHWHVTGPVCGGGIQTREVYCAQSVPAAAALRAKEVSRPVEKALCVGPAPLPSQLCNIPCSTDCIVSSWSAWGLCIHENCHEPQGKKGFRTRQRHVLMESTGPAGHCPHLVESVPCEDPMCYRWLASEGICFPDHGKCGLGHRILKAVCQNDRGEDVSGSLCPVPPPPERKSCEIPCRMDCVLSEWTEWSSCSQSCSNKNSDGKQTRSRTILALAGEGGKPCPPSQALQEHRLCNDHSCMQLHWETSPWGPCSEDTLVTALNATIGWNGEATCGVGIQTRRVFCVKSHVGQVMTKRCPDSTRPETVRPCFLPCKKDCIVTAFSEWTPCPRMCQAGNATVKQSRYRIIIQEAANGGQECPDTLYEERECEDVSLCPVYRWKPQKWSPCILVPESVWQGITGSSEACGKGLQTRAVSCISDDNRSAEMMECLKQTNGMPLLVQECTVPCREDCTFTAWSKFTPCSTNCEATKSRRRQLTGKSRKKEKCQDSDLYPLVETELCPCDEFISQPYGNWSDCILPEGRREPHRGLRVQADSKECGEGLRFRAVACSDKNGRPVDPSFCSSSGYIQEKCVIPCPFDCKLSDWSSWGSCSSSCGIGVRIRSKWLKEKPYNGGRPCPKLDLKNQVHEAVPCYSECNQYSWVVEHWSSCKINNELRSLRCGGGTQSRKIRCVNTADGEGGAVDSNLCNQDEIPPETQSCSLMCPNECVMSEWGLWSKCPQSCDPHTMQRRTRHLLRPSLNSRTCAEDSQVQPCLLNENCFQFQYNLTEWSTCQLSENAPCGQGVRTRLLSCVCSDGKPVSMDQCEQHNLEKPQRMSIPCLVECVVNCQLSGWTAWTECSQTCGHGGRMSRTRFIIMPTQGEGRPCPTELTQEKTCPVTPCYSWVLGNWSACKLEGGDCGEGVQIRSLSCMVHSGSISHAAGRVEDALCGEMPFQDSILKQLCSVPCPGDCHLTEWSEWSTCELTCIDGRSFETVGRQSRSRTFIIQSFENQDSCPQQVLETRPCTGGKCYHYTWKASLWNNNERTVWCQRSDGVNVTGGCSPQARPAAIRQCIPACRKPFSYCTQGGVCGCEKGYTEIMKSNGFLDYCMKVPGSEDKKADVKNLSGKNRPVNSKIHDIFKGWSLQPLDPDGRVKIWVYGVSGGAFLIMIFLIFTSYLVCKKPKPHQSTPPQQKPLTLAYDGDLDM

SEQ ID NO: 206 - DNA, 4821 bp, Homo sapiens
  CDS (1)...(4821)
atgtttccaaagagcaacctaacagtcacttgctgggtatggaggagcatgaggaagctctttctattgctttctctcttgctgtcccatgcagctcatttggaaggcaaaaaggataatcagttcatctggaaaccaggtccgtggggaaggtgtacaggagactgtggtcccggaggagtccagagtcgggcagtgtggtgttttcatgttgacgggtggacaagtcacctgtctaactgtggtgagagcaacaggcctccaaaggaaagaagttgtttccgagtttgtgactggcacagtgacctctttcagtgggaggtttctgactggcaccactgtgtgcttgttccttacgctcgcggtgaagtcaagcctcggactgcagagtgtgtgacggctcagcatggactgcagcaccggatggtgcgctgcattcagaagctgaaccgaactgtggttgcaaatgaaatatgcgaacactttgcccttcagcctcctacagaacaggcttgcctcattccttgtccccgggattgtgtagtatctgagttcttaccatggtccaactgtagcaagggatgtgggaagaaattgcagcatagaactcgcgcggtcatagctccccctctctttggtggtttgcaatgtccaaatctgactgagtcaagagcctgtgatgctcccatttcctgtcctcttggggaagaggaatatacatttagccttaaggttggaccatggagtaaatgcagactgcctcatcttaaagaaattaatccaagcggaagaactgttctggattttaactctgattcaaatgagcgagtcacctttaaacatcaaagttacaaagcacatcatcattcgaagtcttgggcaatagagataggttatcaaacccggcaggtttcgtgtacaagaagtgatggacaaaatgctatgttaagcctttgccttcaagattccttcccattgactgttcagtcctgcatcatgcccaaagactgtgaaacctcccagtggtcctcctggagcccctgctccaagacatgccgttcagggagtctcttgccaggatttaggagcaggagccggaacgtgaagcacatggctattggaggtggaaaggagtgtcctgaacttcttgagaaagaggcctgcattgttgaaggagaacttctgcagcaatgtcccaggtattcctggagaacttctgaatggaaagaatgccaagtctctctcctcctcgagcagcaggatccccactggcatgtgacgggacccgtgtgtggcggtgggatccagacccgggaggtgtactgtgcccagagcgtaccagcagctgccgcactgagggccaaggaagtctctagacctgtggaaaaggcattatgtgtgggacccgccccgttgccctctcagctctgcaatatcccttgctctacggactgcatagtatcttcctggtcagcctggggcctgtgcatccatgaaaactgtcatgaacctcaggggaaaaaaggatttagaacgaggcagcgccatgtcctcatggaatctacagggcctgcagggcattgccctcatttggtggagtctgttccttgtgaggatccaatgtgctaccgatggctggcatcagaagggatctgtttccctgatcatggaaaatgtggcctgggacatcgtattctgaaggccgtctgccagaatgaccgcggagaagatgtatcagggagtctttgcccagttccccctcctcctgagaggaagtcttgtgaaattccctgccgaatggactgtgtgctgagcgagtggacggagtggtcatcctgttcccagtcctgttcaaataaaaactcagatgggaaacagaccaggtcaagaactatcctggcactggctggggaaggtggaaagccatgtccccctagtcaggctctccaagagcatcgtttgtgtaatgaccattcctgtatgcagcttcactgggagacatcgccttggggcccttgttctgaggacacattggtaactgcccttaatgcaaccattggctggaatggagaagccacgtgtggtgtaggcattcagactcggagagtcttctgtgtcaagagtcacgtgggacaagtaatgaccaaaagatgtccagattctactcgacctgaaactgtgcgcccctgttttctcccatgcaaaaaagactgtattgtgactgctttcagtgagtggacaccctgcccaaggatgtgccaagcaggaaatgccacagtaaaacagtctcgatacagaatcatcatccaagaagcagccaatggaggccaggaatgcccagataccttatatgaggagagagagtgtgaagatgtttccttgtgtcctgtatatcggtggaagccacagaaatggagcccttgcatcttagtgccagagtctgtctggcagggaataacgggcagcagtgaagcctgtggaaaggggttacaaacaagagctgtctcatgcatctctgatgacaaccggtcagcagaaatgatggaatgcctcaagcagacaaacggcatgcctctccttgtgcaagaatgcacagtcccatgtcgagaagactgcaccttcactgcttggtccaagtttacgccctgctccacgaactgtgaagccacaaaaagtaggcggcgacagctcacagggaaaagcagaaagaaggagaaatgccaggattctgacctttaccctctagtggagacagaactatgtccttgtgatgaatttatatcccaaccttatggaaactggtcagattgcattcttccagaaggcagaagggagcctcaccgaggactgcgggtacaagcagacagcaaagaatgtggagaaggcctgcgctttcgagcagtagcctgttctgataaaaatggaagacctgttgacccctccttctgcagcagctctggttacattcaagaaaaatgtgtcattccctgcccatttgattgcaagttaagcgattggtctagttgggggtcttgcagttcatcttgtggaattggagtgagaattcgatccaaatggctaaaagaaaaaccttacaatggaggacgaccatgtcccaaactggatctcaagaatcaggtacatgaggcagtcccatgttacagtgagtgcaatcagtattcctgggttgtagaacactggtcttcatgcaaaatcaacaatgagctgaggtccctgcgctgtggaggaggaacacaatctaggaaaatcagatgtgtgaatactgcggatggtgaaggtggagcagtggatagcaacctgtgcaaccaggatgaaattcccccagaaacccagtcctgttctcttatgtgtcccaatgagtgtgtcatgtctgagtggggactttggagcaaatgcccacagtcatgcgatccccacacaatgcagagaagaactcgccacctgctaagaccatcactgaactcaaggacttgtgctgaagactcacaggtgcagccttgcctcctgaatgaaaattgcttccagttccagtacaatctaacagagtggagcacatgccagctgagtgaaaacgcaccctgtggtcaaggcgtcaggacccgcctgctaagctgtgtgtgcagtgatggcaagccagtcagcatggaccaatgtgagcagcataatttggagaagccccagagaatgagcattccctgcttggtggaatgcgtggtcaactgtcagctctcagggtggacggcttggacagagtgttcacagacctgtggccatggaggtcgaatgagccggactcgatttatcattatgccaacccaaggagaaggacggccatgccccacagagcttacccaggagaaaacctgcccagtgaccccctgctacagctgggtccttggcaactggtctgcatgtaaattggagggtggagactgtggggaaggagttcagatccgcagcctttcctgcatggtccacagtggttcaatatctcatgcagctggacgtgtcgaggatgcactgtgtggagaaatgccctttcaggacagcatcctgaagcagctgtgttctgtgccttgcccaggagactgccatttaacagaatggtcagagtggagcacatgtgaattaacctgcattgatggaagaagctttgagactgtgggccgccagtctagatcaaggacttttataattcagtcttttgagaaccaagacagctgcccccaacaggttctagaaacacgcccttgtacaggaggcaaatgttatcactacacatggaaagcaagtctttggaacaataacgaacgaactgtatggtgccagcgttcagatggcgttaatgtcacaggaggctgctcccctcaggcccgtcctgctgccattcggcagtgcattccagcctgcagaaaacctttctcctactgtacacagggtggagtctgtggttgtgagaagggctatacagagataatgaaatcaaatggtttcctggattactgcatgaaagtaccaggctcagaggataaaaaagctgatgtgaaaaacctttctgggaaaaacagacctgtgaattcaaaaatacatgatatttttaaaggatggtctcttcaaccacttgatccagatggccgagtaaaaatttgggtttatggcgtttcaggtggcgcttttctcatcatgattttcctaatatttacttcctaccttgtttgcaagaagccaaaaccacatcaaagcacacctccccaacagaagcctctgaccttagcctacgatggagacttagacatgtaa

SEQ ID NO: 207 - protein, 1606 aa, Homo sapiens
MFPKSNLTVTCWVWRSMRKLFLLLSLLLSHAAHLEGKKDNQFIWKPGPWGRCTGDCGPGGVQSRAVWCFHVDGWTSHLSNCGESNRPPKERSCFRVCDWHSDLFQWEVSDWHHCVLVPYARGEVKPRTAECVTAQHGLQHRMVRCIQKLNRTVVANEICEHFALQPPTEQACLIPCPRDCVVSEFLPWSNCSKGCGKKLQHRTRAVIAPPLFGGLQCPNLTESRACDAPISCPLGEEEYTFSLKVGPWSKCRLPHLKEINPSGRTVLDFNSDSNERVTFKHQSYKAHHHSKSWAIEIGYQTRQVSCTRSDGQNAMLSLCLQDSFPLTVQSCIMPKDCETSQWSSWSPCSKTCRSGSLLPGFRSRSRNVKHMAIGGGKECPELLEKEACIVEGELLQQCPRYSWRTSEWKECQVSLLLEQQDPHWHVTGPVCGGGIQTREVYCAQSVPAAAALRAKEVSRPVEKALCVGPAPLPSQLCNIPCSTDCIVSSWSAWGLCIHENCHEPQGKKGFRTRQRHVLMESTGPAGHCPHLVESVPCEDPMCYRWLASEGICFPDHGKCGLGHRILKAVCQNDRGEDVSGSLCPVPPPPERKSCEIPCRMDCVLSEWTEWSSCSQSCSNKNSDGKQTRSRTILALAGEGGKPCPPSQALQEHRLCNDHSCMQLHWETSPWGPCSEDTLVTALNATIGWNGEATCGVGIQTRRVFCVKSHVGQVMTKRCPDSTRPETVRPCFLPCKKDCIVTAFSEWTPCPRMCQAGNATVKQSRYRIIIQEAANGGQECPDTLYEERECEDVSLCPVYRWKPQKWSPCILVPESVWQGITGSSEACGKGLQTRAVSCISDDNRSAEMMECLKQTNGMPLLVQECTVPCREDCTFTAWSKFTPCSTNCEATKSRRRQLTGKSRKKEKCQDSDLYPLVETELCPCDEFISQPYGNWSDCILPEGRREPHRGLRVQADSKECGEGLRFRAVACSDKNGRPVDPSFCSSSGYIQEKCVIPCPFDCKLSDWSSWGSCSSSCGIGVRIRSKWLKEKPYNGGRPCPKLDLKNQVHEAVPCYSECNQYSWVVEHWSSCKINNELRSLRCGGGTQSRKIRCVNTADGEGGAVDSNLCNQDEIPPETQSCSLMCPNECVMSEWGLWSKCPQSCDPHTMQRRTRHLLRPSLNSRTCAEDSQVQPCLLNENCFQFQYNLTEWSTCQLSENAPCGQGVRTRLLSCVCSDGKPVSMDQCEQHNLEKPQRMSIPCLVECVVNCQLSGWTAWTECSQTCGHGGRMSRTRFIIMPTQGEGRPCPTELTQEKTCPVTPCYSWVLGNWSACKLEGGDCGEGVQIRSLSCMVHSGSISHAAGRVEDALCGEMPFQDSILKQLCSVPCPGDCHLTEWSEWSTCELTCIDGRSFETVGRQSRSRTFIIQSFENQDSCPQQVLETRPCTGGKCYHYTWKASLWNNNERTVWCQRSDGVNVTGGCSPQARPAAIRQCIPACRKPFSYCTQGGVCGCEKGYTEIMKSNGFLDYCMKVPGSEDKKADVKNLSGKNRPVNSKIHDIFKGWSLQPLDPDGRVKIWVYGVSGGAFLIMIFLIFTSYLVCKKPKPHQSTPPQQKPLTLAYDGDLDM

SEQ ID NO: 208 - DNA, 5080 bp, Homo sapiens
  misc_feature (1)...(5080): n = A,T,C or G
ganccanagtagcnnccgggttgccagacgctggaatgggtggtcttccgacacacaccaccatctttcttgcgctcgggaagctcggggctcagcggctcccagaggttacggcggcggctctggcgagacgggaataggcaagtcaagaggctgaaaaatctgaagcatgtttccaaagagcaacctaacagtcacttgctgggtatggaggagcatgaggaagctctttctattgctttctctcttgctgtcccatgcagctcatttggaaggcaaaaaggataatcagttcatctggaaaccaggtccgtggggaaggtgtacaggagactgtggtcccggaggagtccagagtcgggcagtgtggtgttttcatgttgacgggtggacaagtcacctgtctaactgtggtgagagcaacaggcctccaaaggaaagaagttgtttccgagtttgtgactggcacagtgacctctttcagtgggaggtttctgactggcaccactgtgtgcttgttccttacgctcgcggtgaagtcaagcctcggactgcagagtgtgtgacggctcagcatggactgcagcaccggatggtgcgctgcattcagaagctgaaccgaactgtggttgcaaatgaaatatgcgaacactttgcccttcagcctcctacagaacaggcttgcctcattccttgtccccgggattgtgtagtatctgagttcttaccatggtccaactgtagcaagggatgtgggaagaaattgcagcatagaactcgcgcggtcatagctccccctctctttggtggtttgcaatgtccaaatctgactgagtcaagagcctgtgatgctcccatttcctgtcctcttggggaagaggaatatacatttagccttaaggttggaccatggagtaaatgcagactgcctcatcttaaagaaattaatccaagcggaagaactgttctggattttaactctgattcaaatgagcgagtcacctttaaacatcaaagttacaaagcacatcatcattcgaagtcttgggcaatagagataggttatcaaacccggcaggtttcgtgtacaagaagtgatggacaaaatgctatgttaagcctttgccttcaagattccttcccattgactgttcagtcctgcatcatgcccaaagactgtgaaacctcccagtggtcctcctggagcccctgctccaagacatgccgttcagggagtctcttgccaggatttaggagcaggagccggaacgtgaagcacatggctattggaggtggaaaggagtgtcctgaacttcttgagaaagaggcctgcattgttgaaggagaacttctgcagcaatgtcccaggtattcctggagaacttctgaatggaaagaatgccaagtctctctcctcctcgagcagcaggatccccactggcatgtgacgggacccgtgtgtggcggtgggatccagacccgggaggtgtactgtgcccagagcgtaccagcagctgccgcactgagggccaaggaagtctctagacctgtggaaaaggcattatgtgtgggacccgccccgttgccctctcagctctgcaatatcccttgctctacggactgcatagtatcttcctggtcagcctggggcctgtgcatccatgaaaactgtcatgaacctcaggggaaaaaaggatttagaacgaggcagcgccatgtcctcatggaatctacagggcctgcagggcattgccctcatttggtggagtctgttccttgtgaggatccaatgtgctaccgatggctggcatcagaagggatctgtttccctgatcatggaaaatgtggcctgggacatcgtattctgaaggccgtctgccagaatgaccgcggagaagatgtatcagggagtctttgcccagttccccctcctcctgagaggaagtcttgtgaaattccctgccgaatggactgtgtgctgagcgagtggacggagtggtcatcctgttcccagtcctgttcaaataaaaactcagatgggaaacagaccaggtcaagaactatcctggcactggctggggaaggtggaaagccatgtccccctagtcaggctctccaagagcatcgtttgtgtaatgaccattcctgtatgcagcttcactgggagacatcgccttggggcccttgttctgaggacacattggtaactgcccttaatgcaaccattggctggaatggagaagccacgtgtggtgtaggcattcagactcggagagtcttctgtgtcaagagtcacgtgggacaagtaatgaccaaaagatgtccagattctactcgacctgaaactgtgcgcccctgttttctcccatgcaaaaaagactgtattgtgactgctttcagtgagtggacaccctgcccaaggatgtgccaagcaggaaatgccacagtaaaacagtctcgatacagaatcatcatccaagaagcagccaatggaggccaggaatgcccagataccttatatgaggagagagagtgtgaagatgtttccttgtgtcctgtatatcggtggaagccacagaaatggagcccttgcatcttagtgccagagtctgtctggcagggaataacgggcagcagtgaagcctgtggaaaggggttacaaacaagagctgtctcatgcatctctgatgacaaccggtcagcagaaatgatggaatgcctcaagcagacaaacggcatgcctctccttgtgcaagaatgcacagtcccatgtcgagaagactgcaccttcactgcttggtccaagtttacgccctgctccacgaactgtgaagccacaaaaagtaggcggcgacagctcacagggaaaagcagaaagaaggagaaatgccaggattctgacctttaccctctagtggagacagaactatgtccttgtgatgaatttatatcccaaccttatggaaactggtcagattgcattcttccagaaggcagaagggagcctcaccgaggactgcgggtacaagcagacagcaaagaatgtggagaaggcctgcgctttcgagcagtagcctgttctgataaaaatggaagacctgttgacccctccttctgcagcagctctggttacattcaagaaaaatgtgtcattccctgcccatttgattgcaagttaagcgattggtctagttgggggtcttgcagttcatcttgtggaattggagtgagaattcgatccaaatggctaaaagaaaaaccttacaatggaggacgaccatgtcccaaactggatctcaagaatcaggtacatgaggcagtcccatgttacagtgagtgcaatcagtattcctgggttgtagaacactggtcttcatgcaaaatcaacaatgagctgaggtccctgcgctgtggaggaggaacacaatctaggaaaatcagatgtgtgaatactgcggatggtgaaggtggagcagtggatagcaacctgtgcaaccaggatgaaattcccccagaaacccagtcctgttctcttatgtgtcccaatgagtgtgtcatgtctgagtggggactttggagcaaatgcccacagtcatgcgatccccacacaatgcagagaagaactcgccacctgctaagaccatcactgaactcaaggacttgtgctgaagactcacaggtgcagccttgcctcctgaatgaaaattgcttccagttccagtacaatctaacagagtggagcacatgccagctgagtgaaaacgcaccctgtggtcaaggcgtcaggacccgcctgctaagctgtgtgtgcagtgatggcaagccagtcagcatggaccaatgtgagcagcataatttggagaagccccagagaatgagcattccctgcttggtggaatgcgtggtcaactgtcagctctcagggtggacggcttggacagagtgttcacagacctgtggccatggaggtcgaatgagccggactcgatttatcattatgccaacccaaggagaaggacggccatgccccacagagcttacccaggagaaaacctgcccagtgaccccctgctacagctgggtccttggcaactggtctgcatgtaaattggagggtggagactgtggggaaggagttcagatccgcagcctttcctgcatggtccacagtggttcaatatctcatgcagctggacgtgtcgaggatgcactgtgtggagaaatgccctttcaggacagcatcctgaagcagctgtgttctgtgccttgcccaggagactgccatttaacagaatggtcagagtggagcacatgtgaattaacctgcattgatggaagaagctttgagactgtgggccgccagtctagatcaaggacttttataattcagtcttttgagaaccaagacagctgcccccaacaggttctagaaacacgcccttgtacaggaggcaaatgttatcactacacatggaaagcaagtctttggaacaataacgaacgaactgtatggtgccagcgttcagatggcgttaatgtcacaggaggctgctcccctcaggcccgtcctgctgccattcggcagtgcattccagcctgcagaaaacctttctcctactgtacacagggtggagtctgtggttgtgagaagggctatacagagataatgaaatcaaatggtttcctggattactgcatgaaagtaccaggctcagaggataaaaaagctgatgtgaaaaacctttctgggaaaaacagacctgtgaattcaaaaatacatgatatttttaaaggatggtctcttcaaccacttgatccagatggccgagtaaaaatttgggtttatggcgtttcaggtggcgcttttctcatcatgattttcctaatatttacttcctaccttgtttgcaagaagccaaaaccacatcaaagcacacctccccaacagaagcctctgaccttagcctacgatggagacttagacatgtaatctgaaaaagaaatccaaatgtagacatcaactgccttaaccgctttctcttttgtagctctcagacttctcagttttttgaggaatctc

SEQ ID NO: 209 - DNA, 2634 bp, Homo sapiens
  CDS (1)...(2634)
atggagaactggactggcaggccctggctgtatctgctgctgcttctgtccctccctcagctctgcttggatcaggaggtgttgtccggacactctcttcagacacctacagaggagggccagggccccgaaggtgtctggggaccttgggtccagtgggcctcttgctcccagccctgcggggtgggggtgcagcgcaggagccggacatgtcagctccctacagtgcagctccacccgagtctgcccctccctccccggcccccaagacatccagaagccctcctcccccggggccagggtcccagaccccagacttctccagaaaccctccccttgtacaggacacagtctcggggaaggggtggcccacttcgaggtcccgcttcccacctagggagagaggagacccaggagattcgagcggccaggaggtcccggcttcgagaccccatcaagccaggaatgttcggttatgggagagtgccctttgcattgccactgcaccggaaccgcaggcaccctcggagcccacccagatctgagctgtccctgatctcttctagaggggaagaggctattccgtcccctactccaagagcagagccattctccgcaaacggcagcccccaaactgagctccctcccacagaactgtctgtccacaccccatccccccaagcagaacctctaagccctgaaactgctcagacagaggtggcccccagaaccaggcctgcccccctacggcatcaccccagagcccaggcctctggcacagagcccccctcacccacgcactccttaggagaaggtggcttcttccgtgcatcccctcagccacgaaggccaagttcccagggttgggccagtccccaggtagcagggagacgccctgatccttttccttcggtccctcggggccgaggccagcagggccaagggccttggggaacgggggggactcctcacgggccccgcctggagcctgaccctcagcacccgggcgcctggctgcccctgctgagcaacggcccccatgccagctccctctggagcctctttgctcccagtagccctattccaagatgttctggggagagtgaacagctaagagcctgcagccaagcgccctgcccccctgagcagccagacccccgggccctgcagtgcgcagcctttaactcccaggaattcatgggccagctgtatcagtgggagcccttcactgaagtccagggctcccagcgctgtgaactgaactgccggccccgtggcttccgcttctatgtccgtcacactgaaaaggtccaggatgggaccctgtgtcagcctggagcccctgacatctgtgtggctggacgctgtctgagccccggctgtgatgggatccttggctctggcaggcgtcctgatggctgtggagtctgtgggggtgatgattctacctgtcgccttgtttcggggaacctcactgaccgagggggccccctgggctatcagaagatcttgtggattccagcgggagccttgcggctccagattgcccagctccggcctagctccaactacctggcacttcgtggccctgggggccggtccatcatcaatgggaactgggctgtggatccccctgggtcctacagggccggcgggaccgtctttcgatataaccgtcctcccagggaggagggcaaaggggagagtctgtcggctgaaggccccaccacccagcctgtggatgtctatatgatctttcaggaggaaaacccaggcgttttttatcagtatgtcatctcttcacctcctccaatccttgagaaccccaccccagagccccctgtcccccagcttcagccggagattctgagggtggagcccccacttgctccggcaccccgcccagcccggaccccaggcaccctccagcgtcaggtgcggatcccccagatgcccgccccgccccatcccaggacacccctggggtctccagctgcgtactggaaacgagtgggacactctgcatgctcagcgtcctgcgggaaaggtgtctggcgccccattttcctctgcatctcccgtgagtcgggagaggaactggatgaacgcagctgtgccgcgggtgccaggcccccagcctcccctgaaccctgccacggcaccccatgccccccatactgggaggctggcgagtggacatcctgcagccgctcctgtggccccggcacccagcaccgccagctgcagtgccggcaggaatttggggggggtggctcctcggtgcccccggagcgctgtggacatctcccccggcccaacatcacccagtcttgccagctgcgcctctgtggccattgggaagttggctctccttggagccagtgctccgtgcggtgcggccggggccagagaagccggcaggttcgctgtgttgggaacaacggtgatgaagtgagcgagcaggagtgtgcgtcaggccccccacagccccccagcagagaggcctgtgacatggggccctgtactactgcctggttccacagcgactggagctccaaggtgagcccggaacccccagccatatcctgcatcctgggtaaccatgcccaggacacctcagcctttccagcatag

SEQ ID NO: 210 - protein, 877 aa, Homo sapiens
MENWTGRPWLYLLLLLSLPQLCLDQEVLSGHSLQTPTEEGQGPEGVWGPWVQWASCSQPCGVGVQRRSRTCQLPTVQLHPSLPLPPRPPRHPEALLPRGQGPRPQTSPETLPLYRTQSRGRGGPLRGPASHLGREETQEIRAARRSRLRDPIKPGMFGYGRVPFALPLHRNRRHPRSPPRSELSLISSRGEEAIPSPTPRAEPFSANGSPQTELPPTELSVHTPSPQAEPLSPETAQTEVAPRTRPAPLRHHPRAQASGTEPPSPTHSLGEGGFFRASPQPRRPSSQGWASPQVAGRRPDPFPSVPRGRGQQGQGPWGTGGTPHGPRLEPDPQHPGAWLPLLSNGPHASSLWSLFAPSSPIPRCSGESEQLRACSQAPCPPEQPDPRALQCAAFNSQEFMGQLYQWEPFTEVQGSQRCELNCRPRGFRFYVRHTEKVQDGTLCQPGAPDICVAGRCLSPGCDGILGSGRRPDGCGVCGGDDSTCRLVSGNLTDRGGPLGYQKILWIPAGALRLQIAQLRPSSNYLALRGPGGRSIINGNWAVDPPGSYRAGGTVFRYNRPPREEGKGESLSAEGPTTQPVDVYMIFQEENPGVFYQYVISSPPPILENPTPEPPVPQLQPEILRVEPPLAPAPRPARTPGTLQRQVRIPQMPAPPHPRTPLGSPAAYWKRVGHSACSASCGKGVWRPIFLCISRESGEELDERSCAAGARPPASPEPCHGTPCPPYWEAGEWTSCSRSCGPGTQHRQLQCRQEFGGGGSSVPPERCGHLPRPNITQSCQLRLCGHWEVGSPWSQCSVRCGRGQRSRQVRCVGNNGDEVSEQECASGPPQPPSREACDMGPCTTAWFHSDWSSKVSPEPPAISCILGNHAQDTSAFPA

SEQ ID NO: 211 - DNA, 2895 bp, Homo sapiens
gtggccgccgcggagcgaggttgcctggagagagcgcctgggcgcagaagggttaacgggccaccgggggctcgcagagcaggagggtgctctcggacggtgtgtcccccactgcactcctgaacttggaggacagggtcgccgcgagggacgcagagagcaccctccacgcccagatgcctgcgtagtttttgtgaccagtccgctcctgcctccccctggggcagtagagggggagcgatggagaactggactggcaggccctggctgtatctgctgctgcttctgtccctccctcagctctgcttggatcaggaggtgttgtccggacactctcttcagacacctacagaggagggccagggccccgaaggtgtctggggaccttgggtccagtgggcctcttgctcccagccctgcggggtgggggtgcagcgcaggagccggacatgtcagctccctacagtgcagctccacccgagtctgcccctccctccccggcccccaagacatccagaagccctcctcccccggggccagggtcccagaccccagacttctccagaaaccctccccttgtacaggacacagtctcggggaaggggtggcccacttcgaggtcccgcttcccacctagggagagaggagacccaggagattcgagcggccaggaggtcccggcttcgagaccccatcaagccaggaatgttcggttatgggagagtgccctttgcattgccactgcaccggaaccgcaggcaccctcggagcccacccagatctgagctgtccctgatctcttctagaggggaagaggctattccgtcccctactccaagagcagagccattctccgcaaacggcagcccccaaactgagctccctcccacagaactgtctgtccacaccccatccccccaagcagaacctctaagccctgaaactgctcagacagaggtggcccccagaaccaggcctgcccccctacggcatcaccccagagcccaggcctctggcacagagcccccctcacccacgcactccttaggagaaggtggcttcttccgtgcatcccctcagccacgaaggccaagttcccagggttgggccagtccccaggtagcagggagacgccctgatccttttccttcggtccctcggggccgaggccagcagggccaagggccttggggaacgggggggactcctcacgggccccgcctggagcctgaccctcagcacccgggcgcctggctgcccctgctgagcaacggcccccatgccagctccctctggagcctctttgctcccagtagccctattccaagatgttctggggagagtgaacagctaagagcctgcagccaagcgccctgcccccctgagcagccagacccccgggccctgcagtgcgcagcctttaactcccaggaattcatgggccagctgtatcagtgggagcccttcactgaagtccagggctcccagcgctgtgaactgaactgccggccccgtggcttccgcttctatgtccgtcacactgaaaaggtccaggatgggaccctgtgtcagcctggagcccctgacatctgtgtggctggacgctgtctgagccccggctgtgatgggatccttggctctggcaggcgtcctgatggctgtggagtctgtgggggtgatgattctacctgtcgccttgtttcggggaacctcactgaccgagggggccccctgggctatcagaagatcttgtggattccagcgggagccttgcggctccagattgcccagctccggcctagctccaactacctggcacttcgtggccctgggggccggtccatcatcaatgggaactgggctgtggatccccctgggtcctacagggccggcgggaccgtctttcgatataaccgtcctcccagggaggagggcaaaggggagagtctgtcggctgaaggccccaccacccagcctgtggatgtctatatgatctttcaggaggaaaacccaggcgttttttatcagtatgtcatctcttcacctcctccaatccttgagaaccccaccccagagccccctgtcccccagcttcagccggagattctgagggtggagcccccacttgctccggcaccccgcccagcccggaccccaggcaccctccagcgtcaggtgcggatcccccagatgcccgccccgccccatcccaggacacccctggggtctccagctgcgtactggaaacgagtgggacactctgcatgctcagcgtcctgcgggaaaggtgtctggcgccccattttcctctgcatctcccgtgagtcgggagaggaactggatgaacgcagctgtgccgcgggtgccaggcccccagcctcccctgaaccctgccacggcaccccatgccccccatactgggaggctggcgagtggacatcctgcagccgctcctgtggccccggcacccagcaccgccagctgcagtgccggcaggaatttggggggggtggctcctcggtgcccccggagcgctgtggacatctcccccggcccaacatcacccagtcttgccagctgcgcctctgtggccattgggaagttggctctccttggagccagtgctccgtgcggtgcggccggggccagagaagccggcaggttcgctgtgttgggaacaacggtgatgaagtgagcgagcaggagtgtgcgtcaggccccccacagccccccagcagagaggcctgtgacatggggccctgtactactgcctggttccacagcgactggagctccaaggtgagcccggaacccccagccatatcctgcatcctgggtaaccatgcccaggacacctcagcctttccagcatagctcaataaacttgtattgatc

SEQ ID NO: 212 - DNA, 5289 bp, Homo sapiens
  CDS (1)...(5289)
atggaatgctgccgtcgggcaactcctggcacactgctcctctttctggctttcctgctcctgagttccaggaccgcacgctccgaggaggaccgggacggcctatgggatgcctggggcccatggagtgaatgctcacgcacctgcgggggtggggcctcctactctctgaggcgctgcctgagcagcaagagctgtgaaggaagaaatatccgatacagaacatgcagtaatgtggactgcccaccagaagcaggtgatttccgagctcagcaatgctcagctcataatgatgtcaagcaccatggccagttttatgaatggcttcctgtgtctaatgaccctgacaacccatgttcactcaagtgccaagccaaaggaacaaccctggttgttgaactagcacctaaggtcttagatggtacgcgttgctatacagaatctttggatatgtgcatcagtggtttatgccaaattgttggctgcgatcaccagctgggaagcaccgtcaaggaagataactgtggggtctgcaacggagatgggtccacctgccggctggtccgagggcagtataaatcccagctctccgcaaccaaatcggatgatactgtggttgcaattccctatggaagtagacatattcgccttgtcttaaaaggtcctgatcacttatatctggaaaccaaaaccctccaggggactaaaggtgaaaacagtctcagctccacaggaactttccttgtggacaattctagtgtggacttccagaaatttccagacaaagagatactgagaatggctggaccactcacagcagatttcattgtcaagattcgtaactcgggctccgctgacagtacagtccagttcatcttctatcaacccatcatccaccgatggagggagacggatttctttccttgctcagcaacctgtggaggaggttatcagctgacatcggctgagtgctacgatctgaggagcaaccgtgtggttgctgaccaatactgtcactattacccagagaacatcaaacccaaacccaagcttcaggagtgcaacttggatccttgtccagccagtgacggatacaagcagatcatgccttatgacctctaccatccccttcctcggtgggaggccaccccatggaccgcgtgctcctcctcgtgtggggggggcatccagagccgggcagtttcctgtgtggaggaggacatccaggggcatgtcacttcagtggaagagtggaaatgcatgtacacccctaagatgcccatcgcgcagccctgcaacatttttgactgccctaaatggctggcacaggagtggtctccgtgcacagtgacatgtggccagggcctcagataccgtgtggtcctctgcatcgaccatcgaggaatgcacacaggaggctgtagcccaaaaacaaagccccacataaaagaggaatgcatcgtacccactccctgctataaacccaaagagaaacttccagtcgaggccaagttgccatggttcaaacaagctcaagagctagaagaaggagctgctgtgtcagaggagccctcgttcatcccagaggcctggtcggcctgcacagtcacctgtggtgtggggacccaggtgcgaatagtcaggtgccaggtgctcctgtctttctctcagtccgtggctgacctgcctattgacgagtgtgaagggcccaagccagcatcccagcgtgcctgttatgcaggcccatgcagcggggaaattcctgagttcaacccagacgagacagatgggctctttggtggcctgcaggatttcgacgagctgtatgactgggagtatgaggggttcaccaagtgctccgagtcctgtggaggaggtgtccaggaggctgtggtgagctgcttgaacaaacagactcgggagcctgctgaggagaacctgtgcgtgaccagccgccggcccccacagctcctgaagtcctgcaatttggatccctgcccagcaaggtgggaaattggcaagtggagtccatgtagtctcacatgtggggtcggcctacagaccagagacgtcttctgcagccacctgctttccagagagatgaatgaaacagtcatcctggctgatgagctgtgtcgccagcccaagcccagcacggtgcaagcttgtaaccgctttaattgccccccagcctggtaccctgcacagtggcagccgtgttccagaacgtgtggcgggggtgttcagaaacgtgaggttctttgcaagcagcgcatggctgatggcagcttcctggagcttcctgagaccttctgttcagcttcaaaacctgcctgccagcaagcatgcaagaaagatgactgtcccagcgagtggcttctctcagactggacagagtgttccacaagctgcggggaaggcacccagactcgaagcgccatttgccgaaagatgctgaaaaccggcctctcaacggttgtcaattccaccctgtgcccgcccctgcctttctcttcctccatcaggccctgtatgctggcaacctgtgcaaggcccgggcggccatccacgaagcacagcccgcacatcgcggccgccaggaaggtctacatccagactcgcaggcagaggaagctgcacttcgtggtggggggcttcgcctacctgctccccaagacggcggtggtgctgcgctgcccggcgcgcagggtccgcaagcccctcatcacctgggagaaggacggccagcacctcatcagctcgacgcacgtcacggtggcccccttcggctatctcaagatccaccgcctcaagccctcggatgcaggcgtctacacctgctcagcgggcccggcccgggagcactttgtgattaagctcatcggaggcaaccgcaagctcgtggcccggcccttgagcccgagaagtgaggaagaggtgcttgcggggaggaagggcggcccgaaggaggccctgcagacccacaaacaccagaacgggatcttctccaacggcagcaaggcggagaagcggggcctggccgccaacccggggagccgctacgacgacctcgtctcccggctgctggagcagggcggctggcccggagagctgctggcctcgtgggaggcgcaggactccgcggaaaggaacacgacctcggaggaggacccgggtgcagagcaagtgctcctgcacctgcccttcaccatggtgaccgagcagcggcgcctggacgacatcctggggaacctctcccagcagcccgaggagctgcgcgacctctacagcaagcacctggtggcccagctggcccaggagatcttccgcagccacctggagcaccaggacacgctcctgaagccctcggagcgcaggacttccccagtgactctctcgcctcataaacacgtgtctggcttcagcagctccctgcggacctcctccaccggggacgccgggggaggctctcgaaggccacaccgcaagcccaccatcctgcgcaagatctcagcggcccagcagctctcagcctcggaggtggtcacccacctggggcagacggtggccctggccagcgggacactgagtgttcttctgcactgtgaggccatcggccacccaaggcctaccatcagctgggccaggaatggagaagaagttcagttcagtgacaggattcttctacagccagatgattccttacagatcttggcaccagtggaagcagatgtgggtttctacacttgcaatgccaccaatgccttgggatacgactctgtctccattgccgtcacattagcaggaaagccactagtgaaaacgtcacgaatgacagtgatcaacacggagaagcctgcagtcacagtcgatataggaagcaccatcaaaacagtgcagggagtgaatgtgacaatcaactgccaggttgcaggagtgcctgaagctgaagtcacttggttcaggaataaaagcaaactgggctccccgcaccatctgcacgaaggctccttgctgctcacaaacgtgtcctcctcggatcagggcctgtactcctgcagggcggccaatcttcatggagagctgactgagagcacccagctgctgatcctagatcccccccaagtccccacacagttggaagacatcagggccttgctcgctgccactggaccgaaccttccttcagtgctgacgtctcctctgggaacacagctggtcctggatcctgggaattctgctctccttggctgccccatcaaaggtcaccctgtccctaatatcacctggtttcatggtggtcagccaattgtcactgccacaggactgacgcatcacatcttggcagctggacagatccttcaagttgcaaaccttagcggtgggtctcaaggggaattcagctgccttgctcagaatgaggcaggggtgctcatgcagaaggcatctttagtgatccaagattactggtggtctgtggacagactggcaacctgctcagcctcctgtggtaaccggggggttcagcagccccgcttgaggtgcctgctgaacagcacggaggtcaaccctgcccactgcgcagggaaggttcgccctgcggtgcagcccatcgcgtgcaaccggagagactgcccttctcggtggatggtgacctcctggtctgcctgtacccggagctgtgggggaggtgtccagacccgcagggtgacctgtcaaaagctgaaagcctctgggatctccacccctgtgtccaatgacatgtgcacccaggtcgccaagcggcctgtggacacccaggcctgtaaccagcagctgtgtgtggagtgggccttctccagctggggccagtgcaatgggccttgcatcgggcctcacctagctgtgcaacacagacaagtcttctgccagacacgggatggcatcaccttaccatcagagcagtgcagtgctcttccgaggcctgtgagcacccagaactgctggtcagaggcctgcagtgtacactggagagtcagcctgtggaccctgtgcacagctacctgtggcaactacggcttccagtcccggcgtgtggagtgtgtgcatgcccgcaccaacaaggcagtgcctgagcacctgtgctcctgggggccccggcctgccaactggcagcgctgcaacatcaccccatgtgaaaacatggagtgcagagacaccaccaggtactgcgagaaggtgaaacagctgaaactctgccaactcagccagtttaaatctcgctgctgtggaacttgtggcaaagcgtga

SEQ ID NO: 213 - protein, 1762 aa, Homo sapiens
MECCRRATPGTLLLFLAFLLLSSRTARSEEDRDGLWDAWGPWSECSRTCGGGASYSLRRCLSSKSCEGRNIRYRTCSNVDCPPEAGDFRAQQCSAHNDVKHHGQFYEWLPVSNDPDNPCSLKCQAKGTTLVVELAPKVLDGTRCYTESLDMCISGLCQIVGCDHQLGSTVKEDNCGVCNGDGSTCRLVRGQYKSQLSATKSDDTVVAIPYGSRHIRLVLKGPDHLYLETKTLQGTKGENSLSSTGTFLVDNSSVDFQKFPDKEILRMAGPLTADFIVKIRNSGSADSTVQFIFYQPIIHRWRETDFFPCSATCGGGYQLTSAECYDLRSNRVVADQYCHYYPENIKPKPKLQECNLDPCPASDGYKQIMPYDLYHPLPRWEATPWTACSSSCGGGIQSRAVSCVEEDIQGHVTSVEEWKCMYTPKMPIAQPCNIFDCPKWLAQEWSPCTVTCGQGLRYRVVLCIDHRGMHTGGCSPKTKPHIKEECIVPTPCYKPKEKLPVEAKLPWFKQAQELEEGAAVSEEPSFIPEAWSACTVTCGVGTQVRIVRCQVLLSFSQSVADLPIDECEGPKPASQRACYAGPCSGEIPEFNPDETDGLFGGLQDFDELYDWEYEGFTKCSESCGGGVQEAVVSCLNKQTREPAEENLCVTSRRPPQLLKSCNLDPCPARWEIGKWSPCSLTCGVGLQTRDVFCSHLLSREMNETVILADELCRQPKPSTVQACNRFNCPPAWYPAQWQPCSRTCGGGVQKREVLCKQRMADGSFLELPETFCSASKPACQQACKKDDCPSEWLLSDWTECSTSCGEGTQTRSAICRKMLKTGLSTVVNSTLCPPLPFSSSIRPCMLATCARPGRPSTKHSPHIAAARKVYIQTRRQRKLHFVVGGFAYLLPKTAVVLRCPARRVRKPLITWEKDGQHLISSTHVTVAPFGYLKIHRLKPSDAGVYTCSAGPAREHFVIKLIGGNRKLVARPLSPRSEEEVLAGRKGGPKEALQTHKHQNGIFSNGSKAEKRGLAANPGSRYDDLVSRLLEQGGWPGELLASWEAQDSAERNTTSEEDPGAEQVLLHLPFTMVTEQRRLDDILGNLSQQPEELRDLYSKHLVAQLAQEIFRSHLEHQDTLLKPSERRTSPVTLSPHKHVSGFSSSLRTSSTGDAGGGSRRPHRKPTILRKISAAQQLSASEVVTHLGQTVALASGTLSVLLHCEAIGHPRPTISWARNGEEVQFSDRILLQPDDSLQILAPVEADVGFYTCNATNALGYDSVSIAVTLAGKPLVKTSRMTVINTEKPAVTVDIGSTIKTVQGVNVTINCQVAGVPEAEVTWFRNKSKLGSPHHLHEGSLLLTNVSSSDQGLYSCRAANLHGELTESTQLLILDPPQVPTQLEDIRALLAATGPNLPSVLTSPLGTQLVLDPGNSALLGCPIKGHPVPNITWFHGGQPIVTATGLTHHILAAGQILQVANLSGGSQGEFSCLAQNEAGVLMQKASLVIQDYWWSVDRLATCSASCGNRGVQQPRLRCLLNSTEVNPAHCAGKVRPAVQPIACNRRDCPSRWMVTSWSACTRSCGGGVQTRRVTCQKLKASGISTPVSNDMCTQVAKRPVDTQACNQQLCVEWAFSSWGQCNGPCIGPHLAVQHRQVFCQTRDGITLPSEQCSALPRPVSTQNCWSEACSVHWRVSLWTLCTATCGNYGFQSRRVECVHARTNKAVPEHLCSWGPRPANWQRCNITPCENMECRDTTRYCEKVKQLKLCQLSQFKSRCCGTCGKA

SEQ ID NO: 214 - DNA, 1311 bp, Homo sapiens
  CDS (1)...(1311)
atgtcctgctgtctggtctcaccggtgggtgctccaggcatctgtgtatgcccctgtctgtctggaccaggtgtgatcctaggagcgcccctggcctccagctgcgcaggagcctgtggtaccagcttcccagatggcctcacccctgagggaacccaggcctccggggacaaggacattcctgcaattaaccaagggctcatcctggaagaaaccccagagagcagcttcctcatcgagggggacatcatccggccgagtcccttccgactgctgtcagcaaccagcaacaaatggcccatgggtggtagtggtgtcgtggaggtccccttcctgctctccagcaagtacgatgagcccagccgccaggtcatcctggaggctcttgcggagtttgaacgttccacgtgcatcaggtttgtcacctatcaggaccagagagacttcatttccatcatccccatgtatgggtgcttctcgagtgtggggcgcagtggagggatgcaggtggtctccctggcgcccacgtgtctccagaagggccggggcattgtccttcatgagctcatgcatgtgctgggcttctggcacgagcacacgcgggccgaccgggaccgctatatccgtgtcaactggaacgagatcctgccaggctttgaaatcaacttcatcaagtctcggagcagcaacatgctgacgccctatgactactcctctgtgatgcactatgggaggctcgccttcagccggcgtgggctgcccaccatcacaccactttgggcccccagtgtccacatcggccagcgatggaacctgagtgcctcggacatcacccgggtcctcaaactctacggctgcagcccaagtggccccaggccccgtgggagagggtcccatgcccacagcactggtaggagccccgctccggcctccctatctctgcagcggcttttggaggcactgtcggcggaatccaggagccccgaccccagtggttccagtgcgggaggccagcccgttcctgcagggcctggggagagcccacatgggtgggagtcccctgccctgaaaaagctcagtgcagaggcctcggcaaggcagcctcagaccctagcttcctccccaagatcaaggcctggagcaggtgcccccggtgttgctcaggagcagtcctggctggccggagtgtccaccaagcccacagtcccatcttcagaagcaggaatccagccagtccctgtccagggaagcccagctctgccagggggctgtgtacctagaaatcatttcaaggggatgtccgaagattaa

SEQ ID NO: 215 - protein, 436 aa, Homo sapiens
MSCCLVSPVGAPGICVCPCLSGPGVILGAPLASSCAGACGTSFPDGLTPEGTQASGDKDIPAINQGLILEETPESSFLIEGDIIRPSPFRLLSATSNKWPMGGSGVVEVPFLLSSKYDEPSRQVILEALAEFERSTCIRFVTYQDQRDFISIIPMYGCFSSVGRSGGMQVVSLAPTCLQKGRGIVLHELMHVLGFWHEHTRADRDRYIRVNWNEILPGFEINFIKSRSSNMLTPYDYSSVMHYGRLAFSRRGLPTITPLWAPSVHIGQRWNLSASDITRVLKLYGCSPSGPRPRGRGSHAHSTGRSPAPASLSLQRLLEALSAESRSPDPSGSSAGGQPVPAGPGESPHGWESPALKKLSAEASARQPQTLASSPRSRPGAGAPGVAQEQSWLAGVSTKPTVPSSEAGIQPVPVQGSPALPGGCVPRNHFKGMSED

SEQ ID NO: 216 - DNA, 1586 bp, Homo sapiens
ccgaggtctgtcctgcctccttccttcctgcccctcctctacctcataggtggggcacatggtcccttttggtccccctaagggagctccttccctgaggtcatctagaccttggcaccagttggggttgagcagggaggctgggaaggctccttggctttgtgctggagcctactcttcctagggactgagtcttaccgtctgatcccccacacccaccccatgtcctgctgtctggtctcaccggtgggtgctccaggcatctgtgtatgcccctgtctgtctggaccaggtgtgatcctaggagcgcccctggcctccagctgcgcaggagcctgtggtaccagcttcccagatggcctcacccctgagggaacccaggcctccggggacaaggacattcctgcaattaaccaagggctcatcctggaagaaaccccagagagcagcttcctcatcgagggggacatcatccggccgagtcccttccgactgctgtcagcaaccagcaacaaatggcccatgggtggtagtggtgtcgtggaggtccccttcctgctctccagcaagtacgatgagcccagccgccaggtcatcctggaggctcttgcggagtttgaacgttccacgtgcatcaggtttgtcacctatcaggaccagagagacttcatttccatcatccccatgtatgggtgcttctcgagtgtggggcgcagtggagggatgcaggtggtctccctggcgcccacgtgtctccagaagggccggggcattgtccttcatgagctcatgcatgtgctgggcttctggcacgagcacacgcgggccgaccgggaccgctatatccgtgtcaactggaacgagatcctgccaggctttgaaatcaacttcatcaagtctcggagcagcaacatgctgacgccctatgactactcctctgtgatgcactatgggaggctcgccttcagccggcgtgggctgcccaccatcacaccactttgggcccccagtgtccacatcggccagcgatggaacctgagtgcctcggacatcacccgggtcctcaaactctacggctgcagcccaagtggccccaggccccgtgggagagggtcccatgcccacagcactggtaggagccccgctccggcctccctatctctgcagcggcttttggaggcactgtcggcggaatccaggagccccgaccccagtggttccagtgcgggaggccagcccgttcctgcagggcctggggagagcccacatgggtgggagtcccctgccctgaaaaagctcagtgcagaggcctcggcaaggcagcctcagaccctagcttcctccccaagatcaaggcctggagcaggtgcccccggtgttgctcaggagcagtcctggctggccggagtgtccaccaagcccacagtcccatcttcagaagcaggaatccagccagtccctgtccagggaagcccagctctgccagggggctgtgtacctagaaatcatttcaaggggatgtccgaagattaagcctgtggcttctgtccccaagtagggagggcatcctctgcccagtggagctg

SEQ ID NO: 217 - DNA, 2589 bp, Homo sapiens
  CDS (1)...(2589)
atggagtgcgccctcctgctcgcgtgtgccttcccggctgcgggttcgggcccgccgaggggcctggcgggactggggcgcgtggccaaggcgctccagctgtgctgcctctgctgtgcgtcggtcgccgcggccttagccagtgacagcagcagcggcgccagcggattaaatgatgattacgtctttgtcacgccagtagaagtagactcagccgggtcatatatttcacacgacattttgcacaacggcaggaaaaagcgatcggcgcagaatgccagaagctccctgcactaccgattttcagcatttggacaggaactgcacttagaacttaagccctcggcgattttgagcagtcactttattgtccaggtacttggaaaagatggtgcttcagagactcagaaacccgaggtgcagcaatgcttctatcagggatttatcagaaatgacagctcctcctctgtcgctgtgtctacgtgtgctggcttgtcaggtttaataaggacacgaaaaaatgaattcctcatctcgccattacctcagcttctggcccaggaacacaactacagctcccctgcgggtcaccatcctcacgtactgtacaaaaggacagcagaggagaagatccagcggtaccgtggctaccccggctctggccggaattatcctggttactccccaagtcacattccccatgcatctcagagtcgagagacagagtatcaccatcgaaggttgcaaaagcagcatttttgtggacgacgcaagaaatatgctcccaagcctcccacagaggacacctatctaaggtttgatgaatatgggagctctgggcgacccagaagatcagctggaaaatcacaaaagggcctcaatgtggaaaccctcgtggtggcagacaagaaaatggtggaaaagcatggcaagggaaatgtcaccacatacattctcacagtaatgaacatggtttctggcctatttaaagatgggactattggaagtgacataaacgtggttgtggtgagcctaattcttctggaacaagaacctggaggattattgatcaaccatcatgcagaccagtctctgaatagtttttgtcaatggcagtctgccctcattggaaagaatggcaagagacatgatcatgccatcttactaacaggatttgatatttgttcttggaagaatgaaccatgtgacactctagggtttgcccccatcagtggaatgtgctctaagtaccgaagttgtaccatcaatgaggacacaggacttggccttgccttcaccatcgctcatgagtcagggcacaactttggtatgattcacgacggagaagggaatccctgcagaaaggctgaaggcaatatcatgtctcccacactgaccggaaacaatggagtgttttcatggtcttcctgcagccgccagtatctcaagaaattcctcagcacacctcaggcggggtgtctagtggatgagcccaagcaagcaggacagtataaatatccggacaaactaccaggacagatttatgatgctgacacacagtgtaaatggcaatttggagcaaaagccaagttatgcagccttggttttgtgaaggatatttgcaaatcactttggtgccaccgagtaggccacaggtgtgagaccaagtttatgcccgcagcagaagggaccgtttgtggcttgagtatgtggtgtcggcaaggccagtgcgtaaagtttggggagctcgggccccggcccatccacggccagtggtccgcctggtcgaagtggtcagaatgttcccggacatgtggtggaggagtcaagttccaggagagacactgcaataaccccaagcctcagtatggtggcttattctgtccaggttctagccgtatttatcagctgtgcaatattaacccttgcaatgaaaatagcttggattttcgggctcaacagtgtgcagaatataacagcaaacctttccgtggatggttctaccagtggaaaccctatacaaaagtggaagaggaagatcgatgcaaactgtactgcaaggctgagaactttgaatttttttttgcaatgtccggcaaagtgaaagatggaactccctgctccccaaacaaaaatgatgtttgtattgacggggtttgtgaactagtgggatgtgatcatgaactaggctctaaagcagtttcagatgcttgtggcgtttgcaaaggtgataattcaacttgcaagttttataaaggcctgtacctcaaccagcataaagcaaatgaatattatccggtggtcctcattccagctggcgcccgaagcatcgaaatccaggagctgcaggtttcctccagttacctcgcagttcgaagcctcagtcaaaagtattacctcaccgggggctggagcatcgactggcctggggagttccccttcgctgggaccacgtttgaataccagcgctctttcaaccgcccggaacgtctgtacgcgccagggcccacaaatgagacgctggtctttgaagtaagccccttctgtgtattcagttctcagtgcttcttgctacatttatatcgttga

SEQ ID NO: 218 - protein, 862 aa, Homo sapiens
MECALLLACAFPAAGSGPPRGLAGLGRVAKALQLCCLCCASVAAALASDSSSGASGLNDDYVFVTPVEVDSAGSYISHDILHNGRKKRSAQNARSSLHYRFSAFGQELHLELKPSAILSSHFIVQVLGKDGASETQKPEVQQCFYQGFIRNDSSSSVAVSTCAGLSGLIRTRKNEFLISPLPQLLAQEHNYSSPAGHHPHVLYKRTAEEKIQRYRGYPGSGRNYPGYSPSHIPHASQSRETEYHHRRLQKQHFCGRRKKYAPKPPTEDTYLRFDEYGSSGRPRRSAGKSQKGLNVETLVVADKKMVEKHGKGNVTTYILTVMNMVSGLFKDGTIGSDINVVVVSLILLEQEPGGLLINHHADQSLNSFCQWQSALIGKNGKRHDHAILLTGFDICSWKNEPCDTLGFAPISGMCSKYRSCTINEDTGLGLAFTIAHESGHNFGMIHDGEGNPCRKAEGNIMSPTLTGNNGVFSWSSCSRQYLKKFLSTPQAGCLVDEPKQAGQYKYPDKLPGQIYDADTQCKWQFGAKAKLCSLGFVKDICKSLWCHRVGHRCETKFMPAAEGTVCGLSMWCRQGQCVKFGELGPRPIHGQWSAWSKWSECSRTCGGGVKFQERHCNNPKPQYGGLFCPGSSRIYQLCNINPCNENSLDFRAQQCAEYNSKPFRGWFYQWKPYTKVEEEDRCKLYCKAENFEFFFAMSGKVKDGTPCSPNKNDVCIDGVCELVGCDHELGSKAVSDACGVCKGDNSTCKFYKGLYLNQHKANEYYPVVLIPAGARSIEIQELQVSSSYLAVRSLSQKYYLTGGWSIDWPGEFPFAGTTFEYQRSFNRPERLYAPGPTNETLVFEVSPFCVFSSQCFLLHLYR

SEQ ID NO: 219 - DNA, 3013 bp, Homo sapiens
ggcgcgctgggggagccagctggcgctgtcttccccatcgcctcagacgctcacaccgacacagacagacgcacagacgggcgggcagacaccgacagtctcccaaccgtttgcgctccagtcccggcccagggagccccccgtaccctctggggtgccgcaaactgcagctcggcaggcccgcgccgggagaagggagggcgcgcaggcggccggaggaggggaggtcccagcgcgcccccgctgcgatgtgaacggcggcggctctcacctggagccgcacctggggcgccgagctccggggccgcggaaagaatgcgcgccgcccgtgcgctccgcctgccgcgtctggccacccgcagccgccgcgtccgcacctgaccatggagtgcgccctcctgctcgcgtgtgccttcccggctgcgggttcgggcccgccgaggggcctggcgggactggggcgcgtggccaaggcgctccagctgtgctgcctctgctgtgcgtcggtcgccgcggccttagccagtgacagcagcagcggcgccagcggattaaatgatgattacgtctttgtcacgccagtagaagtagactcagccgggtcatatatttcacacgacattttgcacaacggcaggaaaaagcgatcggcgcagaatgccagaagctccctgcactaccgattttcagcatttggacaggaactgcacttagaacttaagccctcggcgattttgagcagtcactttattgtccaggtacttggaaaagatggtgcttcagagactcagaaacccgaggtgcagcaatgcttctatcagggatttatcagaaatgacagctcctcctctgtcgctgtgtctacgtgtgctggcttgtcaggtttaataaggacacgaaaaaatgaattcctcatctcgccattacctcagcttctggcccaggaacacaactacagctcccctgcgggtcaccatcctcacgtactgtacaaaaggacagcagaggagaagatccagcggtaccgtggctaccccggctctggccggaattatcctggttactccccaagtcacattccccatgcatctcagagtcgagagacagagtatcaccatcgaaggttgcaaaagcagcatttttgtggacgacgcaagaaatatgctcccaagcctcccacagaggacacctatctaaggtttgatgaatatgggagctctgggcgacccagaagatcagctggaaaatcacaaaagggcctcaatgtggaaaccctcgtggtggcagacaagaaaatggtggaaaagcatggcaagggaaatgtcaccacatacattctcacagtaatgaacatggtttctggcctatttaaagatgggactattggaagtgacataaacgtggttgtggtgagcctaattcttctggaacaagaacctggaggattattgatcaaccatcatgcagaccagtctctgaatagtttttgtcaatggcagtctgccctcattggaaagaatggcaagagacatgatcatgccatcttactaacaggatttgatatttgttcttggaagaatgaaccatgtgacactctagggtttgcccccatcagtggaatgtgctctaagtaccgaagttgtaccatcaatgaggacacaggacttggccttgccttcaccatcgctcatgagtcagggcacaactttggtatgattcacgacggagaagggaatccctgcagaaaggctgaaggcaatatcatgtctcccacactgaccggaaacaatggagtgttttcatggtcttcctgcagccgccagtatctcaagaaattcctcagcacacctcaggcggggtgtctagtggatgagcccaagcaagcaggacagtataaatatccggacaaactaccaggacagatttatgatgctgacacacagtgtaaatggcaatttggagcaaaagccaagttatgcagccttggttttgtgaaggatatttgcaaatcactttggtgccaccgagtaggccacaggtgtgagaccaagtttatgcccgcagcagaagggaccgtttgtggcttgagtatgtggtgtcggcaaggccagtgcgtaaagtttggggagctcgggccccggcccatccacggccagtggtccgcctggtcgaagtggtcagaatgttcccggacatgtggtggaggagtcaagttccaggagagacactgcaataaccccaagcctcagtatggtggcttattctgtccaggttctagccgtatttatcagctgtgcaatattaacccttgcaatgaaaatagcttggattttcgggctcaacagtgtgcagaatataacagcaaacctttccgtggatggttctaccagtggaaaccctatacaaaagtggaagaggaagatcgatgcaaactgtactgcaaggctgagaactttgaatttttttttgcaatgtccggcaaagtgaaagatggaactccctgctccccaaacaaaaatgatgtttgtattgacggggtttgtgaactagtgggatgtgatcatgaactaggctctaaagcagtttcagatgcttgtggcgtttgcaaaggtgataattcaacttgcaagttttataaaggcctgtacctcaaccagcataaagcaaatgaatattatccggtggtcctcattccagctggcgcccgaagcatcgaaatccaggagctgcaggtttcctccagttacctcgcagttcgaagcctcagtcaaaagtattacctcaccgggggctggagcatcgactggcctggggagttccccttcgctgggaccacgtttgaataccagcgctctttcaaccgcccggaacgtctgtacgcgccagggcccacaaatgagacgctggtctttgaagtaagccccttctgtgtattcagttctcagtgcttcttgctacatttatatcgttgactgcaatttgagccagaactccagtccttctagttcaaagg

SEQ ID NO: 220 - DNA, 1530 bp, Homo sapiens
  CDS (1)...(1530)
atggagtgcgccctcctgctcgcgtgtgccttcccggctgcgggttcgggcccgccgaggggcctggcgggactggggcgcgtggccaaggcgctccagctgtgctgcctctgctgtgcgtcggtcgccgcggccttagccagtgacagcagcagcggcgccagcggattaaatgatgattacgtctttgtcacgccagtagaagtagactcagccgggtcatatatttcacacgacattttgcacaacggcaggaaaaagcgatcggcgcagaatgccagaagctccctgcactaccgattttcagcatttggacaggaactgcacttagaacttaagccctcggcgattttgagcagtcactttattgtccaggtacttggaaaagatggtgcttcagagactcagaaacccgaggtgcagcaatgcttctatcagggatttatcagaaatgacagctcctcctctgtcgctgtgtctacgtgtgctggcttgtcaggtttaataaggacacgaaaaaatgaattcctcatctcgccattacctcagcttctggcccaggaacacaactacagctcccctgcgggtcaccatcctcacgtactgtacaaaaggacagcagaggagaagatccagcggtaccgtggctaccccggctctggccggaattatcctggttactccccaagtcacattccccatgcatctcagagtcgagagacagagtatcaccatcgaaggttgcaaaagcagcatttttgtggacgacgcaagaaatatgctcccaagcctcccacagaggacacctatctaaggtttgatgaatatgggagctctgggcgacccagaagatcagctggaaaatcacaaaagggcctcaatgtggaaaccctcgtggtggcagacaagaaaatggtggaaaagcatggcaggggaaatgtcaccacatacattctcacagtaatgaacatggtttctggcctatttaaagatgggactattggaagtgacataaacgtggttggggggagcctaattcttctggaacaagaacctggaggattattgatcaaccatcatgcagaccagtctctgaatagtttttgtcaatggcagtctgccctcattggaaagaatggcaagagacatgatcatgccatcttactaacaggatttgatatttgttcttggaagaatgaaccatgtgacactctagggtttgcccccatcagtggaatgtgctctaagtaccgaagttgtaccatcaatgaggacacaggacttggccttgccttcaccatcgctcatgagtcagggcacaactttggtatgattcacgacggagaagggaatccctgcagaaaggctgaaggcaatatcatgtctcccacactgaccggaaacaatggagtgttttcatggtcttcctgcagccgccagtatctcaagaaattcctcaggatctctactcaaccatctctcccctgtgacttccagaggctgctagcacacctcaggcggggtgtctag

SEQ ID NO: 221 - protein, 509 aa, Homo sapiens
MECALLLACAFPAAGSGPPRGLAGLGRVAKALQLCCLCCASVAAALASDSSSGASGLNDDYVFVTPVEVDSAGSYISHDILHNGRKKRSAQNARSSLHYRFSAFGQELHLELKPSAILSSHFIVQVLGKDGASETQKPEVQQCFYQGFIRNDSSSSVAVSTCAGLSGLIRTRKNEFLISPLPQLLAQEHNYSSPAGHHPHVLYKRTAEEKIQRYRGYPGSGRNYPGYSPSHIPHASQSRETEYHHRRLQKQHFCGRRKKYAPKPPTEDTYLRFDEYGSSGRPRRSAGKSQKGLNVETLVVADKKMVEKHGRGNVTTYILTVMNMVSGLFKDGTIGSDINVVGGSLILLEQEPGGLLINHHADQSLNSFCQWQSALIGKNGKRHDHAILLTGFDICSWKNEPCDTLGFAPISGMCSKYRSCTINEDTGLGLAFTIAHESGHNFGMIHDGEGNPCRKAEGNIMSPTLTGNNGVFSWSSCSRQYLKKFLRISTQPSLPCDFQRLLAHLRRGV

SEQ ID NO: 222 - DNA, 2217 bp, Homo sapiens
gcgcgctgggggagccagctggcgctgtcttccccatcgcctcagacgctcacaccgacacagacagacgcacagacgggcgggcagacaccgacagtctcccaaccgtttgcgctccagtcccggcccagggagccccccgtaccctctggggtgccgcaaactgcagctcggcaggcccgcgccgggagaagggagggcgcgcaggcggccggaggaggggaggtcccagcgcgcccccgctgcgatgtgaacggcggcggctctcacctggagccgcacctggggcgccgagctccggggccgcggaaagaatgcgcgccgcccgtgcgctccgcctgccgcgtctggccacccgcagccgccgcgtccgcacctgaccatggagtgcgccctcctgctcgcgtgtgccttcccggctgcgggttcgggcccgccgaggggcctggcgggactggggcgcgtggccaaggcgctccagctgtgctgcctctgctgtgcgtcggtcgccgcggccttagccagtgacagcagcagcggcgccagcggattaaatgatgattacgtctttgtcacgccagtagaagtagactcagccgggtcatatatttcacacgacattttgcacaacggcaggaaaaagcgatcggcgcagaatgccagaagctccctgcactaccgattttcagcatttggacaggaactgcacttagaacttaagccctcggcgattttgagcagtcactttattgtccaggtacttggaaaagatggtgcttcagagactcagaaacccgaggtgcagcaatgcttctatcagggatttatcagaaatgacagctcctcctctgtcgctgtgtctacgtgtgctggcttgtcaggtttaataaggacacgaaaaaatgaattcctcatctcgccattacctcagcttctggcccaggaacacaactacagctcccctgcgggtcaccatcctcacgtactgtacaaaaggacagcagaggagaagatccagcggtaccgtggctaccccggctctggccggaattatcctggttactccccaagtcacattccccatgcatctcagagtcgagagacagagtatcaccatcgaaggttgcaaaagcagcatttttgtggacgacgcaagaaatatgctcccaagcctcccacagaggacacctatctaaggtttgatgaatatgggagctctgggcgacccagaagatcagctggaaaatcacaaaagggcctcaatgtggaaaccctcgtggtggcagacaagaaaatggtggaaaagcatggcaggggaaatgtcaccacatacattctcacagtaatgaacatggtttctggcctatttaaagatgggactattggaagtgacataaacgtggttggggggagcctaattcttctggaacaagaacctggaggattattgatcaaccatcatgcagaccagtctctgaatagtttttgtcaatggcagtctgccctcattggaaagaatggcaagagacatgatcatgccatcttactaacaggatttgatatttgttcttggaagaatgaaccatgtgacactctagggtttgcccccatcagtggaatgtgctctaagtaccgaagttgtaccatcaatgaggacacaggacttggccttgccttcaccatcgctcatgagtcagggcacaactttggtatgattcacgacggagaagggaatccctgcagaaaggctgaaggcaatatcatgtctcccacactgaccggaaacaatggagtgttttcatggtcttcctgcagccgccagtatctcaagaaattcctcaggatctctactcaaccatctctcccctgtgacttccagaggctgctagcacacctcaggcggggtgtctagtggatgagcccaagcaagcaggacagtataaatatccggacaaactaccaggacagatttatgatgctgacacacagtgtaaatggcaatttggagcaaaagccaagttatgcagccttggttttgtgaaggtatgtttgcttgtgatttcaaacttacattaagactctgcaatgtgtctgtgtccctaacagaagtgtaaacatttggtttgccaaggccaagggttaggttctgggttatctctaccgtgtcagttgtttggcatgataattaaagtggcaattttactgtcaatgaattat
